(19) United States
(12) Patent Application Publication
(10) Pub. No.: US 2025/0084436 A1
(43) Pub. Date: Mar. 13, 2025

(54) ADENO-ASSOCIATED VIRUS VECTORS

(71) Applicant: University of Pittsburgh - Of the Commonwealth System of Higher Education, Pittsburgh, PA (US)

(72) Inventors: Leah Caroline THOMAS BYRNE, Pittsburgh, PA (US); Molly E. JOHNSON, Pittsburgh, PA (US); William Richard STAUFFER, Pittsburgh, PA (US); Bilge Esin OZTURK, Pittsburgh, PA (US)

(21) Appl. No.: 18/851,427

(22) PCT Filed: Mar. 30, 2023
(86) PCT No.: PCT/US2023/016867

§ 371 Date: Sep. 26, 2024

Related U.S. Application Data
(60) Provisional application No. 63/325,562, filed on Mar. 30, 2022.
(60) Provisional application No. 63/325,540, filed on Mar. 30, 2022.
(60) Provisional application No. 63/325,542, filed on Mar. 30, 2022.
(60) Provisional application No. 63/325,543, filed on Mar. 30, 2022.
(60) Provisional application No. 63/325,544, filed on Mar. 30, 2022.
(60) Provisional application No. 63/325,548, filed on Mar. 30, 2022.
(60) Provisional application No. 63/325,550, filed on Mar. 30, 2022.
(60) Provisional application No. 63/325,551, filed on Mar. 30, 2022.
(60) Provisional application No. 63/325,553, filed on Mar. 30, 2022.
(60) Provisional application No. 63/325,555, filed on Mar. 30, 2022.
(60) Provisional application No. 63/325,557, filed on Mar. 30, 2022.
(60) Provisional application No. 63/325,558, filed on Mar. 30, 2022.
(60) Provisional application No. 63/325,559, filed on Mar. 30, 2022.

(51) Int. Cl. C12N 15/86; A61K 48/00; C07K 14/005; C12N 5/079; C12N 15/11

(52) U.S. Cl. CPC C12N 15/86; A61K 48/005; A61K 48/0075; C07K 14/005; C12N 5/0621; C12N 15/11; C12N 2310/141; C12N 2510/00; C12N 2750/14122; C12N 2750/14143; C12N 2750/14145

(57) ABSTRACT

This document relates to AAV vectors (e.g., AAV2 vectors). For example, AAV vectors (e.g., AAV2 vectors) containing an AAV capsid polypeptide that includes an amino acid sequence set forth in any one or more of Tables 1A-1L (or a variant thereof) or according to Formula A based on such a set forth sequence, such AAV capsid polypeptides, nucleic acid molecules encoding such vectors, nucleic acid molecules encoding such AAV capsid polypeptides, host cells containing and/or expressing such nucleic acid molecules, and methods and materials for making or using such vectors and/or AAV capsid polypeptides are provided.

### CROSS-REFERENCE TO RELATED APPLICATIONS

[0001] This application claims the benefit of U.S. Patent Application Ser. No. 63/325,562, filed on Mar. 30, 2022, of U.S. Patent Application Ser. No. 63/325,540, filed on Mar. 30, 2022, of U.S. Patent Application Ser. No. 63/325,542, filed on Mar. 30, 2022, of U.S. Patent Application Ser. No. 63/325,543, filed on Mar. 30, 2022, of U.S. Patent Application Ser. No. 63/325,544, filed on Mar. 30, 2022, of U.S. Patent Application Ser. No. 63/325,548, filed on Mar. 30, 2022, of U.S. Patent Application Ser. No. 63/325,550, filed on Mar. 30, 2022, of U.S. Patent Application Ser. No. 63/325,551, filed on Mar. 30, 2022, of U.S. Patent Application Ser. No. 63/325,553, filed on Mar. 30, 2022, of U.S. Patent Application Ser. No. 63/325,555, filed on Mar. 30, 2022, of U.S. Patent Application Ser. No. 63/325,557, filed on Mar. 30, 2022, of U.S. Patent Application Ser. No. 63/325,558, filed on Mar. 30, 2022, and of U.S. Patent Application Ser. No. 63/325,559, filed on Mar. 30, 2022. The disclosures of the prior applications are considered part of (and are incorporated by reference in) the disclosure of this application.

### STATEMENT REGARDING FEDERAL FUNDING

[0002] This invention was made with government support under MH120094 awarded by the National Institutes of Health. The government has certain rights in the invention.

### TECHNICAL FIELD

[0003] This document relates to adeno-associated virus (AAV) vectors. For example, this document provides methods and materials for making and using AAV vectors (e.g., AAV2 vectors) having (a) the ability to deliver nucleic acid to foveal cones, (b) the ability to deliver nucleic acid to retinal cells and drive high expression levels of nucleic acid within retinal cells, (c) the ability to deliver nucleic acid to retinal cells across retinal regions (e.g., across at least two retinal regions), (d) the ability to deliver nucleic acid to retinal cells of the parafovea region of the eye, (e) the ability to deliver nucleic acid to two or more different retinal cell types within an eye, (f) the ability to deliver nucleic acid to retinal pigment epithelial (RPE) cells, (g) an increased efficiency to deliver nucleic acid to photoreceptor cells of the retina, (h) an increased efficiency to deliver nucleic acid to retinal ganglion cells of the retina, (i) an increased efficiency to deliver nucleic acid to bipolar cells of the retina, (j) an increased efficiency to deliver nucleic acid to ON-retinal ganglion cells, (k) an increased efficiency to deliver nucleic acid to OFF-retinal ganglion cells, and/or (1) increased packaging efficiency and the ability to deliver nucleic acid to cells (e.g., retinal cells).

### BACKGROUND

[0004] Viral vectors, such as AAV vectors, are efficient vehicles for in vivo nucleic acid delivery, and their use in the clinic is expanding. Improved AAV vectors and AAV production techniques for making effective AAV vector preparations should further expand the use of AAV vectors in the laboratory and clinic.

### SUMMARY

[0005] This document provides AAV vectors (e.g., AAV2 vectors). For example, this document provides AAV vectors (e.g., AAV2 vectors) containing a capsid polypeptide that includes an amino acid sequence set forth in Table 1A (or a variant thereof) or according to Formula A based on such a set forth sequence. The AAV vectors (e.g., AAV2 vectors) described herein containing a capsid polypeptide that includes an amino acid sequence set forth in Table 1A (or a variant thereof) or according to Formula A based on such a set forth sequence can have the ability to infect foveal cones in vivo and deliver exogenous nucleic acid to the infected foveal cones such that the infected foveal cones express the exogenous nucleic acid. This document also provides methods and materials for making and using AAV vectors (e.g., AAV2 vectors) having the ability to deliver nucleic acid to foveal cones.

[0006] As described herein, an AAV vector (e.g., an AAV2 vector) provided herein having an AAV capsid polypeptide that includes an amino acid sequence set forth in Table 1A (or a variant thereof) or according to Formula A based on such a set forth sequence can have the ability to infect foveal cones in vivo and deliver exogenous nucleic acid to the infected foveal cones such that the infected foveal cones express the exogenous nucleic acid. In some cases, an AAV vector (e.g., an AAV2 vector) provided herein can have the ability to infect and drive mRNA expression of an exogenous nucleic acid in cone cells present in the fovea of a mammal (e.g., a human or a non-human primate). In some cases, an AAV vector (e.g., an AAV2 vector) provided herein can have the ability to drive a level of mRNA expression of an exogenous nucleic acid in foveal cones of a mammal (e.g., a human or a non-human primate) that is greater than (e.g., at least 10 percent greater than, at least 25 percent greater than, at least 50 percent greater than, at least 75 percent greater than, or at least 100 percent greater than) the level of mRNA expression of an exogenous nucleic acid driven by a comparable AAV vector having an AAV capsid polypeptide that consists of the amino acid sequence of SEQ ID NO:1 (e.g., a wild-type AAV2 vector) in foveal cones of a control mammal (e.g., a control human or a control non-human primate). In some cases, an AAV vector (e.g., an AAV2 vector) provided herein having an AAV capsid polypeptide that includes an amino acid sequence set forth in Table 1A (or a variant thereof) or according to Formula A based on such a set forth sequence can be used in place of the 7m8 AAV2 vector (Dalkara et al., Sci. Transl. Med., 5(189):189ra76 (2013) and Bennett et al., J. Struct. Biol., 209(2):107433 (2020)) or in place of the K912 AAV2 vector (Öztürk et al., eLife, 10:e64175 (2021)) to deliver nucleic acid to foveal cones.

[0007] In another aspect, this document provides AAV vectors (e.g., AAV2 vectors) containing a capsid polypeptide that includes an amino acid sequence set forth in Table 1B (or a variant thereof) or according to Formula A based on such a set forth sequence. The AAV vectors (e.g., AAV2 vectors) described herein containing a capsid polypeptide that includes an amino acid sequence set forth in Table 1B (or a variant thereof) or according to Formula A based on such a set forth sequence can have the ability to infect retinal cells (e.g., retinal ganglion cells, photoreceptor cells, and bipolar cells) in vivo and deliver exogenous nucleic acid to the infected retinal cells such that the infected retinal cells express the exogenous nucleic acid at high levels.

[0008] This document also provides methods and materials for making and using AAV vectors (e.g., AAV2 vectors) having the ability to deliver nucleic acid to retinal cells and drive high expression levels of nucleic acid within retinal cells.

[0009] As described herein, an AAV vector (e.g., an AAV2 vector) provided herein having an AAV capsid polypeptide that includes an amino acid sequence set forth in Table 1B (or a variant thereof) or according to Formula A based on such a set forth sequence can have the ability to infect retinal cells (e.g., retinal ganglion cells, photoreceptor cells, and bipolar cells) in vivo and deliver exogenous nucleic acid to the infected retinal cells such that the infected retinal cells express the exogenous nucleic acid at high levels. In some cases, an AAV vector (e.g., an AAV2 vector) provided herein can have the ability to infect and drive mRNA expression of an exogenous nucleic acid in at least 2 percent (e.g., (e.g., at least 2.5 percent, at least 5 percent, at least 7.5 percent, at least 10 percent, or at least 25 percent) of retinal cells (e.g., retinal ganglion cells, photoreceptor cells, and bipolar cells) in an eye of a mammal (e.g., a human or a non-human primate). In some cases, an AAV vector (e.g., an AAV2 vector) provided herein can have the ability to drive a level of mRNA expression of an exogenous nucleic acid in retinal cells (e.g., retinal ganglion cells, photoreceptor cells, and bipolar cells) of a mammal (e.g., a human or a non-human primate) that is greater than (e.g., at least 2 percent greater than, at least 2.5 percent greater than, at least 5 percent greater than, at least 7.5 percent greater than, at least 10 percent greater than, at least 25 percent greater than, at least 50 percent greater than, at least 75 percent greater than, or at least 100 percent greater than) the level of mRNA expression of an exogenous nucleic acid driven by a comparable AAV vector having an AAV capsid polypeptide that consists of the amino acid sequence of SEQ ID NO:1 (e.g., a wild-type AAV2 vector) in retinal cells of a control mammal (e.g., a control human or a control non-human primate). In some cases, an AAV vector (e.g., an AAV2 vector) provided herein having an AAV capsid polypeptide that includes an amino acid sequence set forth in Table 1B (or a variant thereof) or according to Formula A based on such a set forth sequence can be used in place of the 7m8 AAV2 vector (Dalkara et al., Sci. Transl. Med., 5(189):189ra76 (2013) and Bennett et al., J. Struct. Biol., 209(2):107433 (2020)) or in place of the K912 AAV2 vector (Öztürk et al., eLife, 10:e64175 (2021)) to deliver nucleic acid to retinal cells (e.g., retinal ganglion cells, photoreceptor cells, and bipolar cells).

[0010] In another aspect, this document provides AAV vectors (e.g., AAV2 vectors) containing a capsid polypeptide that includes an amino acid sequence set forth in Table 1C (or a variant thereof) or according to Formula A based on such a set forth sequence. The AAV vectors (e.g., AAV2 vectors) described herein containing a capsid polypeptide that includes an amino acid sequence set forth in Table 1C (or a variant thereof) or according to Formula A based on such a set forth sequence can have the ability to infect retinal cells (e.g., retinal ganglion cells, photoreceptor cells, and bipolar cells) across retinal regions (e.g., across at least two retinal regions) in vivo and deliver exogenous nucleic acid to the infected retinal cells such that the infected retinal cells express the exogenous nucleic acid. This document also provides methods and materials for making and using AAV vectors (e.g., AAV2 vectors) having the ability to deliver nucleic acid to retinal cells across retinal regions and drive expression of delivered nucleic acid within the retinal cells. For example, the AAV vectors (e.g., AAV2 vectors) described herein can deliver nucleic acid to at least about 2 percent (e.g., at least about 2.5 percent, at least about 5 percent, at least about 7.5 percent, at least about 10 percent, or at least about 25 percent) of the retinal cells in the fovea region, at least about 2 percent (e.g., at least about 2.5 percent, at least about 5 percent, at least about 7.5 percent, at least about 10 percent, or at least about 25 percent) of the retinal cells in the parafovea region, at least about 2 percent (e.g., at least about 2.5 percent, at least about 5 percent, at least about 7.5 percent, at least about 10 percent, or at least about 25 percent) of the retinal cells in the vascular arcade region, and/or at least about 2 percent (e.g., at least about 2.5 percent, at least about 5 percent, at least about 7.5 percent, at least about 10 percent, or at least about 25 percent) of the retinal cells in the periphery region.

[0011] As described herein, an AAV vector (e.g., an AAV2 vector) provided herein having an AAV capsid polypeptide that includes an amino acid sequence set forth in Table 1C (or a variant thereof) or according to Formula A based on such a set forth sequence can have the ability to infect retinal cells (e.g., retinal ganglion cells, photoreceptor cells, and bipolar cells) across retinal regions (e.g., across at least two retinal regions) in vivo and deliver exogenous nucleic acid to the infected retinal cells such that the infected retinal cells express the exogenous nucleic acid. In some cases, an AAV vector (e.g., an AAV2 vector) provided herein can have the ability to infect and drive mRNA expression of an exogenous nucleic acid in at least about 2 percent (e.g., at least about 2.5 percent, at least about 5 percent, at least about 7.5 percent, at least about percent, or at least about 25 percent) of the retinal cells in the fovea region, at least about 2 percent (e.g., at least about 2.5 percent, at least about 5 percent, at least about 7.5 percent, at least about 10 percent, or at least about 25 percent) of the retinal cells in the parafovea region, at least about 2 percent (e.g., at least about 2.5 percent, at least about 5 percent, at least about 7.5 percent, at least about 10 percent, or at least about 25 percent) of the retinal cells in the vascular arcade region, and/or at least about 2 percent (e.g., at least about 2.5 percent, at least about 5 percent, at least about 7.5 percent, at least about 10 percent, or at least about 25 percent) of the retinal cells in the periphery region of an eye of a mammal (e.g., a human or a non-human primate). In some cases, an AAV vector (e.g., an AAV2 vector) provided herein can have the ability to drive a level of mRNA expression of an exogenous nucleic acid in retinal cells of the fovea region, the parafovea region, the vascular arcade region, and/or the periphery region of an eye of a mammal (e.g., a human or a non-human primate) that is greater than the level of mRNA expression of an exogenous nucleic acid driven by a comparable AAV vector having an AAV capsid polypeptide that consists of the amino acid sequence of SEQ ID NO:1 (e.g., a wild-type AAV2 vector) in retinal cells of those regions in a control mammal (e.g., a control human or a control non-human primate). In some cases, an AAV vector (e.g., an AAV2 vector) provided herein having an AAV capsid polypeptide that includes an amino acid sequence set forth in Table 1C (or a variant thereof) or according to Formula A based on such a set forth sequence can be used in place of the 7m8 AAV2 vector (Dalkara et al., Sci. Transl. Med., 5(189):189ra76 (2013) and Bennett et al., J. Struct. Biol., 209(2):107433 (2020)) or in place of the K912 AAV2 vector (Öztürk et al., eLife, 10:e64175 (2021)) to deliver nucleic acid to retinal cells (e.g., retinal ganglion cells, photoreceptor cells, and bipolar cells).

[0012] In another aspect, this document provides AAV vectors (e.g., AAV2 vectors) containing a capsid polypeptide that includes an amino acid sequence set forth in Table 1D (or a variant thereof) or according to Formula A based on such a set forth sequence. The AAV vectors (e.g., AAV2 vectors) described herein containing a capsid polypeptide that includes an amino acid sequence set forth in Table 1D (or a variant thereof) or according to Formula A based on such a set forth sequence can have the ability to infect retinal cells of the parafovea region of the eye in vivo and deliver exogenous nucleic acid to the infected retinal cells of the parafovea region such that the infected retinal cells express the exogenous nucleic acid. This document also provides methods and materials for making and using AAV vectors (e.g., AAV2 vectors) having the ability to deliver nucleic acid to retinal cells of the parafovea region of the eye.

[0013] As described herein, an AAV vector (e.g., an AAV2 vector) provided herein having an AAV capsid polypeptide that includes an amino acid sequence set forth in Table 1D (or a variant thereof) or according to Formula A based on such a set forth sequence can have the ability to infect retinal cells of the parafovea region of the eye in vivo and deliver exogenous nucleic acid to the infected retinal cells such that the infected retinal cells express the exogenous nucleic acid. In some cases, an AAV vector (e.g., an AAV2 vector) provided herein can have the ability to infect and drive mRNA expression of an exogenous nucleic acid in at least about 2 percent (e.g., at least about 2.5 percent, at least about 5 percent, at least about 7.5 percent, at least about 10 percent, or at least about 25 percent) of the retinal cells present in the parafovea region of an eye of a mammal (e.g., a human or a non-human primate). In some cases, an AAV vector (e.g., an AAV2 vector) provided herein can have the ability to drive a level of mRNA expression of an exogenous nucleic acid in retinal cells of the parafovea region of the eye of a mammal (e.g., a human or a non-human primate) that is greater than (e.g., at least 10 percent greater than, at least percent greater than, at least 50 percent greater than, at least 75 percent greater than, or at least 100 percent greater than) the level of mRNA expression of an exogenous nucleic acid driven by a comparable AAV vector having an AAV capsid polypeptide that consists of the amino acid sequence of SEQ ID NO:1 (e.g., a wild-type AAV2 vector) in retinal cells of the parafovea region of the eye of a control mammal (e.g., a control human or a control non-human primate). In some cases, an AAV vector (e.g., an AAV2 vector) provided herein having an AAV capsid polypeptide that includes an amino acid sequence set forth in Table 1D (or a variant thereof) or according to Formula A based on such a set forth sequence can be used in place of the 7m8 AAV2 vector (Dalkara et al., Sci. Transl. Med., 5(189):189ra76 (2013) and Bennett et al., J. Struct. Biol., 209(2):107433 (2020)) or in place of the K912 AAV2 vector (Öztürk et al., eLife, 10:e64175 (2021)) to deliver nucleic acid to retinal cells (e.g., retinal ganglion cells, photoreceptor cells, and bipolar cells) of the parafovea region of the eye.

[0014] In another aspect, this document provides AAV vectors (e.g., AAV2 vectors) containing a capsid polypeptide that includes an amino acid sequence set forth in Table 1E (or a variant thereof) or according to Formula A based on such a set forth sequence. The AAV vectors (e.g., AAV2 vectors) described herein containing a capsid polypeptide that includes an amino acid sequence set forth in Table 1E (or a variant thereof) or according to Formula A based on such a set forth sequence can have the ability to infect two or more (e.g., two or more, three or more, four or more, five or more, six or more, or seven or more) different retinal cell types within an eye in vivo and deliver exogenous nucleic acid to the infected retinal cells such that the infected retinal cells express the exogenous nucleic acid. This document also provides methods and materials for making and using AAV vectors (e.g., AAV2 vectors) having the ability to deliver nucleic acid to two or more (e.g., two or more, three or more, four or more, five or more, six or more, or seven or more) different retinal cell types within an eye and drive expression of delivered nucleic acid within those retinal cells. For example, the AAV vectors (e.g., AAV2 vectors) described herein can deliver nucleic acid to two, three, four, five, six, or seven of the following retinal cell types of an eye: retinal ganglion cells, amacrine cells, horizontal cells, bipolar cells, Muller glia cells, photoreceptor cells, and retinal pigment epithelial (RPE) cells. In some cases, an AAV vector (e.g., an AAV2 vector) described herein can deliver nucleic acid to at least some (e.g., at least 2 percent, at least 2.5 percent, at least 5 percent, at least 10 percent, or at least 25 percent) of the retinal ganglion cells, amacrine cells, horizontal cells, bipolar cells, Muller glia cells, photoreceptor cells, and RPE cells of an eye of a mammal (e.g., a human or a non-human primate) following an intravitreal administration.

[0015] As described herein, an AAV vector (e.g., an AAV2 vector) provided herein having an AAV capsid polypeptide that includes an amino acid sequence set forth in Table 1E (or a variant thereof) or according to Formula A based on such a set forth sequence can have the ability to infect two or more (e.g., two or more, three or more, four or more, five or more, six or more, or seven or more) different retinal cell types within an eye in vivo and deliver exogenous nucleic acid to the infected retinal cells such that the infected retinal cells express the exogenous nucleic acid. In some cases, an AAV vector (e.g., an AAV2 vector) provided herein can have the ability to infect and drive mRNA expression of an exogenous nucleic acid in at least about 2 percent (e.g., at least about 2.5 percent, at least about 5 percent, at least about 7.5 percent, at least about percent, or at least about 25 percent) of the retinal ganglion cells, at least about 2 percent (e.g., at least about 2.5 percent, at least about 5 percent, at least about 7.5 percent, at least about percent, or at least about 25 percent) of the amacrine cells, at least about 2 percent (e.g., at least about 2.5 percent, at least about 5 percent, at least about 7.5 percent, at least about 10 percent, or at least about 25 percent) of the horizontal cells, at least about 2 percent (e.g., at least about 2.5 percent, at least about 5 percent, at least about 7.5 percent, at least about 10 percent, or at least about 25 percent) of the bipolar cells, at least about 2 percent (e.g., at least about 2.5 percent, at least about 5 percent, at least about 7.5 percent, at least about 10 percent, or at least about 25 percent) of the Muller glia cells, at least about 2 percent (e.g., at least about 2.5 percent, at least about 5 percent, at least about 7.5 percent, at least about 10 percent, or at least about 25 percent) of the photoreceptor cells, and/or at least about 2 percent (e.g., at least about 2.5 percent, at least about 5 percent, at least about 7.5 percent, at least about 10 percent, or at least about 25 percent) of the RPE cells of an eye of a mammal (e.g., a human or a non-human primate) following, for example, an intravitreal administration. In some cases, an AAV vector (e.g., an AAV2 vector) provided herein can have the ability to drive a level of mRNA expression of an exogenous nucleic acid in retinal ganglion cells, amacrine cells, horizontal cells, bipolar cells, Muller glia cells, photoreceptor cells, and/or RPE cells of an eye of a mammal (e.g., a human or a non-human primate) that is greater than (e.g., at least 10 percent greater than, at least 25 percent greater than, at least 50 percent greater than, at least 75 percent greater than, or at least 100 percent greater than) the level of mRNA expression of an exogenous nucleic acid driven by a comparable AAV vector having an AAV capsid polypeptide that consists of the amino acid sequence of SEQ ID NO:1 (e.g., a wild-type AAV2 vector) in those retinal cells in a control mammal (e.g., a control human or a control non-human primate). In some cases, an AAV vector (e.g., an AAV2 vector) provided herein having an AAV capsid polypeptide that includes an amino acid sequence set forth in Table 1E (or a variant thereof) or according to Formula A based on such a set forth sequence can be used in place of the 7m8 AAV2 vector (Dalkara et al., Sci. Transl. Med., 5(189):189ra76 (2013) and Bennett et al., J. Struct. Biol., 209(2):107433 (2020)) or in place of the K912 AAV2 vector (Öztürk et al., eLife, 10:e64175 (2021)) to deliver nucleic acid to two or more (e.g., two or more, three or more, four or more, five or more, six or more, or seven or more) different retinal cell types within an eye of a mammal (e.g., a human or a non-human primate).

[0016] In another aspect, this document provides AAV vectors (e.g., AAV2 vectors) containing a capsid polypeptide that includes an amino acid sequence set forth in Table 1F (or a variant thereof) or according to Formula A based on such a set forth sequence. The AAV vectors (e.g., AAV2 vectors) described herein containing a capsid polypeptide that includes an amino acid sequence set forth in Table 1F (or a variant thereof) or according to Formula A based on such a set forth sequence can have the ability to infect RPE cells in vivo and deliver exogenous nucleic acid to the infected RPE cells such that the infected RPE cells express the exogenous nucleic acid. This document also provides methods and materials for making and using AAV vectors (e.g., AAV2 vectors) having the ability to deliver nucleic acid to RPE cells and drive expression of delivered nucleic acid within the RPE cells. For example, the AAV vectors (e.g., AAV2 vectors) described herein can deliver nucleic acid to at least about 2 percent (e.g., at least about 2.5 percent, at least about 5 percent, at least about 7.5 percent, at least about 10 percent, or at least about 25 percent) of the RPE cells of an eye of a mammal after, for example, an intravitreal administration.

[0017] As described herein, an AAV vector (e.g., an AAV2 vector) provided herein having an AAV capsid polypeptide that includes an amino acid sequence set forth in Table 1F (or a variant thereof) or according to Formula A based on such a set forth sequence can have the ability to infect RPE cells in vivo and deliver exogenous nucleic acid to the infected RPE cells such that the infected RPE cells express the exogenous nucleic acid. In some cases, an AAV vector (e.g., an AAV2 vector) provided herein can have the ability to infect and drive mRNA expression of an exogenous nucleic acid in at least about 2 percent (e.g., at least about 2.5 percent, at least about 5 percent, at least about 7.5 percent, at least about 10 percent, or at least about 25 percent) of the RPE cells of an eye of a mammal (e.g., a human or a non-human primate). In some cases, an AAV vector (e.g., an AAV2 vector) provided herein can have the ability to drive a level of mRNA expression of an exogenous nucleic acid in RPE cells of an eye of a mammal (e.g., a human or a non-human primate) that is greater than (e.g., at least 10 percent greater than, at least percent greater than, at least 50 percent greater than, at least 75 percent greater than, or at least 100 percent greater than) the level of mRNA expression of an exogenous nucleic acid driven by a comparable AAV vector having an AAV capsid polypeptide that consists of the amino acid sequence of SEQ ID NO:1 (e.g., a wild type AAV2 vector) in RPE cells in a control mammal (e.g., a control human or a control non-human primate). In some cases, an AAV vector (e.g., an AAV2 vector) provided herein having an AAV capsid polypeptide that includes an amino acid sequence set forth in Table 1F (or a variant thereof) or according to Formula A based on such a set forth sequence can be used in place of the 7m8 AAV2 vector (Dalkara et al., Sci. Transl. Med., 5(189):189ra76 (2013) and Bennett et al., J. Struct. Biol., 209(2):107433 (2020)) or in place of the K912 AAV2 vector (Öztürk et al., eLife, 10:e64175 (2021)) to deliver nucleic acid to RPE cells.

[0018] In another aspect, this document provides AAV vectors (e.g., AAV2 vectors) containing a capsid polypeptide that includes an amino acid sequence set forth in Table 1G (or a variant thereof) or according to Formula A based on such a set forth sequence. The AAV vectors (e.g., AAV2 vectors) described herein containing a capsid polypeptide that includes an amino acid sequence set forth in Table 1G (or a variant thereof) or according to Formula A based on such a set forth sequence can have the ability to infect photoreceptor cells of the retina in vivo and deliver exogenous nucleic acid to the infected photoreceptor cells such that the infected photoreceptor cells express the exogenous nucleic acid. This document also provides methods and materials for making and using AAV vectors (e.g., AAV2 vectors) having the ability to deliver nucleic acid to photoreceptor cells of the retina.

[0019] As described herein, an AAV vector (e.g., an AAV2 vector) provided herein having an AAV capsid polypeptide that includes an amino acid sequence set forth in Table 1G (or a variant thereof) or according to Formula A based on such a set forth sequence can have the ability to infect photoreceptor cells of the retina in vivo and deliver exogenous nucleic acid to the infected photoreceptor cells such that the infected photoreceptor cells express the exogenous nucleic acid. In some cases, an AAV vector (e.g., an AAV2 vector) provided herein can have the ability to infect and drive mRNA expression of an exogenous nucleic acid in at least about 2 percent (e.g., at least about 2.5 percent, at least about 5 percent, at least about 7.5 percent, at least about 10 percent, or at least about 25 percent) of photoreceptor cells of an eye of a mammal (e.g., a human or a non-human primate). In some cases, an AAV vector (e.g., an AAV2 vector) provided herein can have the ability to drive a level of mRNA expression of an exogenous nucleic acid in photoreceptor cells of the retina of a mammal (e.g., a human or a non-human primate) that is greater than (e.g., at least 10 percent greater than, at least 25 percent greater than, at least 50 percent greater than, at least 75 percent greater than, or at least 100 percent greater than) the level of mRNA expression of an exogenous nucleic acid driven by a comparable AAV vector having an AAV capsid polypeptide that consists of the amino acid sequence of SEQ ID NO: 1 (e.g., a wild-type AAV2 vector) in photoreceptor cells of the retina of a control mammal (e.g., a control human or a control non-human primate). In some cases, an AAV vector (e.g., an AAV2 vector) provided herein having an AAV capsid polypeptide that includes an amino acid sequence set forth in Table 1G (or a variant thereof) or according to Formula A based on such a set forth sequence can be used in place of the 7m8 AAV2 vector (Dalkara et al., Sci. Transl. Med., 5(189):189ra76 (2013) and Bennett et al., J. Struct. Biol., 209(2):107433 (2020)) or in place of the K912 AAV2 vector (Öztürk et al., eLife, 10:e64175 (2021)) to deliver nucleic acid to photoreceptor cells of the retina.

[0020] In another aspect, this document provides AAV vectors (e.g., AAV2 vectors) containing a capsid polypeptide that includes an amino acid sequence set forth in Table 1H (or a variant thereof) or according to Formula A based on such a set forth sequence. The AAV vectors (e.g., AAV2 vectors) described herein containing a capsid polypeptide that includes an amino acid sequence set forth in Table 1H (or a variant thereof) or according to Formula A based on such a set forth sequence can have the ability to infect retinal ganglion cells in vivo and deliver exogenous nucleic acid to the infected retinal ganglion cells such that the infected retinal ganglion cells express the exogenous nucleic acid. This document also provides methods and materials for making and using AAV vectors (e.g., AAV2 vectors) having the ability to deliver nucleic acid to retinal ganglion cells.

[0021] As described herein, an AAV vector (e.g., an AAV2 vector) provided herein having an AAV capsid polypeptide that includes an amino acid sequence set forth in Table 1H (or a variant thereof) or according to Formula A based on such a set forth sequence can have the ability to infect retinal ganglion cells in vivo and deliver exogenous nucleic acid to the infected retinal ganglion cells such that the infected retinal ganglion cells express the exogenous nucleic acid. In some cases, an AAV vector (e.g., an AAV2 vector) provided herein can have the ability to infect and drive mRNA expression of an exogenous nucleic acid in at least about 2 percent (e.g., at least about 2.5 percent, at least about 5 percent, at least about 7.5 percent, at least about 10 percent, or at least about 25 percent) of retinal ganglion cells of an eye of a mammal (e.g., a human or a non-human primate). In some cases, an AAV vector (e.g., an AAV2 vector) provided herein can have the ability to drive a level of mRNA expression of an exogenous nucleic acid in retinal ganglion cells of a mammal (e.g., a human or a non-human primate) that is greater than (e.g., at least 10 percent greater than, at least 25 percent greater than, at least 50 percent greater than, at least 75 percent greater than, or at least 100 percent greater than) the level of mRNA expression of an exogenous nucleic acid driven by a comparable AAV vector having an AAV capsid polypeptide that consists of the amino acid sequence of SEQ ID NO:1 (e.g., a wild-type AAV2 vector) in retinal ganglion cells of an eye of a control mammal (e.g., a control human or a control non-human primate). In some cases, an AAV vector (e.g., an AAV2 vector) provided herein having an AAV capsid polypeptide that includes an amino acid sequence set forth in Table 1H (or a variant thereof) or according to Formula A based on such a set forth sequence can be used in place of the 7m8 AAV2 vector (Dalkara et al., Sci. Transl. Med., 5(189):189ra76 (2013) and Bennett et al., J Struct. Biol., 209(2):107433 (2020)) or in place of the K912 AAV2 vector (Öztürk et al., eLife, 10:e64175 (2021)) to deliver nucleic acid to photoreceptor cells of the retina.

[0022] In another aspect, this document provides AAV vectors (e.g., AAV2 vectors) containing a capsid polypeptide that includes an amino acid sequence set forth in Table 1I (or a variant thereof) or according to Formula A based on such a set forth sequence. The AAV vectors (e.g., AAV2 vectors) described herein containing a capsid polypeptide that includes an amino acid sequence set forth in Table 1I (or a variant thereof) or according to Formula A based on such a set forth sequence can have the ability to infect bipolar cells of the retina in vivo and deliver exogenous nucleic acid to the infected bipolar cells such that the infected retinal bipolar cells express the exogenous nucleic acid. This document also provides methods and materials for making and using AAV vectors (e.g., AAV2 vectors) having the ability to deliver nucleic acid to bipolar cells of the retina.

[0023] As described herein, an AAV vector (e.g., an AAV2 vector) provided herein having an AAV capsid polypeptide that includes an amino acid sequence set forth in Table 1I (or a variant thereof) or according to Formula A based on such a set forth sequence can have the ability to infect bipolar cells of the retina in vivo and deliver exogenous nucleic acid to the infected bipolar cells such that the infected bipolar cells express the exogenous nucleic acid. In some cases, an AAV vector (e.g., an AAV2 vector) provided herein can have the ability to infect and drive mRNA expression of an exogenous nucleic acid in at least about 2 percent (e.g., at least about 2.5 percent, at least about 5 percent, at least about 7.5 percent, at least about 10 percent, or at least about 25 percent) of bipolar cells of the retina of a mammal (e.g., a human or a non-human primate). In some cases, an AAV vector (e.g., an AAV2 vector) provided herein can have the ability to drive a level of mRNA expression of an exogenous nucleic acid in bipolar cells of the retina of a mammal (e.g., a human or a non-human primate) that is greater than (e.g., at least 10 percent greater than, at least 25 percent greater than, at least 50 percent greater than, at least 75 percent greater than, or at least 100 percent greater than) the level of mRNA expression of an exogenous nucleic acid driven by a comparable AAV vector having an AAV capsid polypeptide that consists of the amino acid sequence of SEQ ID NO:1 (e.g., a wild-type AAV2 vector) in bipolar cells of the retina of a control mammal (e.g., a control human or a control non-human primate). In some cases, an AAV vector (e.g., an AAV2 vector) provided herein having an AAV capsid polypeptide that includes an amino acid sequence set forth in Table 1I (or a variant thereof) or according to Formula A based on such a set forth sequence can be used in place of the 7m8 AAV2 vector (Dalkara et al., Sci. Transl. Med., 5(189):189ra76 (2013) and Bennett et al., J. Struct. Biol., 209(2):107433 (2020)) or in place of the K912 AAV2 vector (Öztürk et al., eLife, 10:e64175 (2021)) to deliver nucleic acid to photoreceptor cells of the retina.

[0024] In another aspect, this document provides AAV vectors (e.g., AAV2 vectors) containing a capsid polypeptide that includes an amino acid sequence set forth in Table 1J (or a variant thereof) or according to Formula A based on such a set forth sequence. The AAV vectors (e.g., AAV2 vectors) described herein containing a capsid polypeptide that includes an amino acid sequence set forth in Table 1J (or a variant thereof) or according to Formula A based on such a set forth sequence can have the ability to infect ON-retinal ganglion cells in vivo and deliver exogenous nucleic acid to the infected ON-retinal ganglion cells such that the infected ON-retinal ganglion cells express the exogenous nucleic acid. This document also provides methods and materials for making and using AAV vectors (e.g., AAV2 vectors) having the ability to deliver nucleic acid to ON-retinal ganglion cells.

[0025] As described herein, an AAV vector (e.g., an AAV2 vector) provided herein having an AAV capsid polypeptide that includes an amino acid sequence set forth in Table 1J (or a variant thereof) or according to Formula A based on such a set forth sequence can have the ability to infect ON-retinal ganglion cells in vivo and deliver exogenous nucleic acid to the infected ON-retinal ganglion cells such that the infected ON-retinal ganglion cells express the exogenous nucleic acid. In some cases, an AAV vector (e.g., an AAV2 vector) provided herein can have the ability to infect and drive mRNA expression of an exogenous nucleic acid in at least about 2 percent (e.g., at least about 2.5 percent, at least about 5 percent, at least about 7.5 percent, at least about 10 percent, or at least about 25 percent) of ON-retinal ganglion cells of a mammal (e.g., a human or a non-human primate). In some cases, an AAV vector (e.g., an AAV2 vector) provided herein can have the ability to drive a level of mRNA expression of an exogenous nucleic acid in ON-retinal ganglion cells of a mammal (e.g., a human or a non-human primate) that is greater than (e.g., at least 10 percent greater than, at least 25 percent greater than, at least 50 percent greater than, at least 75 percent greater than, or at least 100 percent greater than) the level of mRNA expression of an exogenous nucleic acid driven by a comparable AAV vector having an AAV capsid polypeptide that consists of the amino acid sequence of SEQ ID NO:1 (e.g., a wild-type AAV2 vector) in ON-retinal ganglion cells of a control mammal (e.g., a control human or a control non-human primate). In some cases, an AAV vector (e.g., an AAV2 vector) provided herein having an AAV capsid polypeptide that includes an amino acid sequence set forth in Table 1J (or a variant thereof) or according to Formula A based on such a set forth sequence can be used in place of the 7m8 AAV2 vector (Dalkara et al., Sci. Transl. Med., 5(189):189ra76 (2013) and Bennett et al., J. Struct. Biol., 209(2):107433 (2020)) or in place of the K912 AAV2 vector (Öztürk et al., eLife, 10:e64175 (2021)) to deliver nucleic acid to photoreceptor cells of the retina.

[0026] In another aspect, this document provides AAV vectors (e.g., AAV2 vectors) containing a capsid polypeptide that includes an amino acid sequence set forth in Table 1K (or a variant thereof) or according to Formula A based on such a set forth sequence. The AAV vectors (e.g., AAV2 vectors) described herein containing a capsid polypeptide that includes an amino acid sequence set forth in Table 1K (or a variant thereof) or according to Formula A based on such a set forth sequence can have the ability to infect OFF-retinal ganglion cells in vivo and deliver exogenous nucleic acid to the infected OFF-retinal ganglion cells such that the infected OFF-retinal ganglion cells express the exogenous nucleic acid. This document also provides methods and materials for making and using AAV vectors (e.g., AAV2 vectors) having the ability to deliver nucleic acid to OFF-retinal ganglion cells.

[0027] As described herein, an AAV vector (e.g., an AAV2 vector) provided herein having an AAV capsid polypeptide that includes an amino acid sequence set forth in Table 1K (or a variant thereof) or according to Formula A based on such a set forth sequence can have the ability to infect OFF-retinal ganglion cells in vivo and deliver exogenous nucleic acid to the infected OFF-retinal ganglion cells such that the infected OFF-retinal ganglion cells express the exogenous nucleic acid. In some cases, an AAV vector (e.g., an AAV2 vector) provided herein can have the ability to infect and drive mRNA expression of an exogenous nucleic acid in at least about 2 percent (e.g., at least about 2.5 percent, at least about 5 percent, at least about 7.5 percent, at least about 10 percent, or at least about 25 percent) of OFF-retinal ganglion cells of a mammal (e.g., a human or a non-human primate). In some cases, an AAV vector (e.g., an AAV2 vector) provided herein can have the ability to drive a level of mRNA expression of an exogenous nucleic acid in OFF-retinal ganglion cells of a mammal (e.g., a human or a non-human primate) that is greater than (e.g., at least 10 percent greater than, at least 25 percent greater than, at least 50 percent greater than, at least 75 percent greater than, or at least 100 percent greater than) the level of mRNA expression of an exogenous nucleic acid driven by a comparable AAV vector having an AAV capsid polypeptide that consists of the amino acid sequence of SEQ ID NO:1 (e.g., a wild-type AAV2 vector) in OFF-retinal ganglion cells of a control mammal (e.g., a control human or a control non-human primate). In some cases, an AAV vector (e.g., an AAV2 vector) provided herein having an AAV capsid polypeptide that includes an amino acid sequence set forth in Table 1K (or a variant thereof) or according to Formula A based on such a set forth sequence can be used in place of the 7m8 AAV2 vector (Dalkara et al., Sci. Transl. Med., 5(189):189ra76 (2013) and Bennett et al., J Struct. Biol., 209(2):107433 (2020)) or in place of the K912 AAV2 vector (Öztürk et al., eLife, 10:e64175 (2021)) to deliver nucleic acid to photoreceptor cells of the retina.

[0028] In another aspect, this document provides AAV vectors (e.g., AAV2 vectors) containing a capsid polypeptide that includes an amino acid sequence set forth in Table 1L (or a variant thereof) or according to Formula A based on such a set forth sequence. The AAV vectors (e.g., AAV2 vectors) described herein containing a capsid polypeptide that includes an amino acid sequence set forth in Table 1L (or a variant thereof) or according to Formula A based on such a set forth sequence can have increased packaging efficiency, the ability to infect cells (e.g., retinal cells) in vivo or in vitro, and the ability to deliver exogenous nucleic acid to the infected cells such that the infected cells express the exogenous nucleic acid. This document also provides methods and materials for making and using AAV vectors (e.g., AAV2 vectors) having increased packaging efficiency, the ability to deliver nucleic acid to cells (e.g., retinal cells) in vivo or in vitro, and the ability to drive expression of delivered nucleic acid within the cells. For example, the AAV vectors (e.g., AAV2 vectors) described herein can have a packaging efficiency greater than that of a comparable AAV vector having an AAV capsid polypeptide that consists of the amino acid sequence of SEQ ID NO:1 (e.g., a wild type AAV2 vector).

[0029] As described herein, an AAV vector (e.g., an AAV2 vector) provided herein having an AAV capsid polypeptide that includes an amino acid sequence set forth in Table 1L (or a variant thereof) or according to Formula A based on such a set forth sequence can have increased packaging efficiency (e.g., package efficiency greater than that of a comparable AAV vector having an AAV capsid polypeptide that consists of the amino acid sequence of SEQ ID NO:1 (e.g., a wild type AAV2 vector)), the ability to infect cells (e.g., retinal cells) in vivo or in vitro, and the ability to drive exogenous nucleic acid to the infected cells such that the infected cells express the exogenous nucleic acid. In some cases, an AAV vector (e.g., an AAV2 vector) provided herein can have a packaging efficiency that is greater than (e.g., at least 10 percent greater than, at least 25 percent greater than, at least 50 percent greater than, at least 75 percent greater than, or at least 100 percent greater than) the packaging efficiency of a comparable AAV vector having an AAV capsid polypeptide that consists of the amino acid sequence of SEQ ID NO:1 (e.g., a wild-type AAV2 vector). In some cases, an AAV vector (e.g., an AAV2 vector) provided herein having an AAV capsid polypeptide that includes an amino acid sequence set forth in Table 1L (or a variant thereof) or according to Formula A based on such a set forth sequence can have a packaging efficiency greater than that of the 7m8 AAV2 vector (Dalkara et al., Sci. Transl. Med., 5(189):189ra76 (2013) and Bennett et al., J Struct. Biol., 209(2):107433 (2020)) or the K912 AAV2 vector (Öztürk et al., eLife, 10:e64175 (2021)).

[0030] In general, one aspect of this document features an adeno-associated virus (AAV) vector comprising an AAV capsid polypeptide, wherein the capsid polypeptide comprises the amino acid sequence of any one of SEQ ID NOs:A2-A19. The capsid polypeptide can comprise the amino acid sequence of SEQ ID NO:1 (or an alternative sequence that is the amino acid sequence set forth in SEQ ID NO:2206 or that is an amino acid sequence at least 95%, at least 96%, at least 97%, at least 98%, or at least 99% identical to the amino acid sequence set forth in SEQ ID NO:1) except that the amino acid sequence of any one of SEQ ID NOs:A2-A19 is located between amino acid positions 587 and 588 of SEQ ID NO:1 (or the appropriate amino acid positions of the alternative sequence). The capsid polypeptide can comprise the amino acid sequence of SEQ ID NO:1 (or an alternative sequence that is the amino acid sequence set forth in SEQ ID NO:2206 or that is an amino acid sequence at least 95%, at least 96%, at least 97%, at least 98%, or at least 99% identical to the amino acid sequence set forth in SEQ ID NO:1) except that the amino acid sequence of any one of SEQ ID NOs:A2-A18 is located between amino acid positions 587 and 588 of SEQ ID NO:1 (or the appropriate amino acid positions of the alternative sequence). The capsid polypeptide can comprise the amino acid sequence of SEQ ID NO:1 (or an alternative sequence that is the amino acid sequence set forth in SEQ ID NO:2206 or that is an amino acid sequence at least 95%, at least 96%, at least 97%, at least 98%, or at least 99% identical to the amino acid sequence set forth in SEQ ID NO:1) except that the amino acids from position 585 to 590 of SEQ ID NO:1 are replaced with the amino acid sequence of any one of SEQ ID NOs:A2-A19. The capsid polypeptide can comprise the amino acid sequence of SEQ ID NO:1 (or an alternative sequence that is the amino acid sequence set forth in SEQ ID NO:2206 or that is an amino acid sequence at least 95%, at least 96%, at least 97%, at least 98%, or at least 99% identical to the amino acid sequence set forth in SEQ ID NO:1) except that the amino acids from position 585 to 590 of SEQ ID NO:1 are replaced with the amino acid sequence of SEQ ID NO:A19. The vector can be an AAV2 vector. The vector can infect greater than 50 percent of foveal cones when a titer of at least 1×10⁷ of the vector is administered intravitreally to an eye of a human (or a non-human primate) (or a non-human primate). The vector can comprise an exogenous nucleic acid encoding an RNA or a polypeptide. The exogenous nucleic acid can encode an RNA. The RNA can be an siRNA or microRNA. The exogenous nucleic acid can encode a polypeptide. The polypeptide can be an ABCA4 polypeptide, a CRB1 polypeptide, an NPHP5 polypeptide, or an NR2E3 polypeptide. The vector can express more nucleic acid in foveal cones than the level of expression from a comparable AAV vector comprising a capsid polypeptide consisting of the amino acid sequence set forth in SEQ ID NO:1.

[0031] In another aspect, this document features an AAV capsid polypeptide comprising the amino acid sequence of any one of SEQ ID NOs:A2-A19. The polypeptide can comprise the amino acid sequence of SEQ ID NO:1 (or an alternative sequence that is the amino acid sequence set forth in SEQ ID NO:2206 or that is an amino acid sequence at least 95%, at least 96%, at least 97%, at least 98%, or at least 99% identical to the amino acid sequence set forth in SEQ ID NO:1) except that the amino acid sequence of any one of SEQ ID NOs:A2-A19 is located between amino acid positions 587 and 588 of SEQ ID NO:1 (or the appropriate amino acid positions of the alternative sequence). The polypeptide can comprise the amino acid sequence of SEQ ID NO:1 (or an alternative sequence that is the amino acid sequence set forth in SEQ ID NO:2206 or that is an amino acid sequence at least 95%, at least 96%, at least 97%, at least 98%, or at least 99% identical to the amino acid sequence set forth in SEQ ID NO:1) except that the amino acid sequence of any one of SEQ ID NOs:A2-A18 is located between amino acid positions 587 and 588 of SEQ ID NO:1 (or the appropriate amino acid positions of the alternative sequence). The polypeptide can comprise the amino acid sequence of SEQ ID NO:1 (or an alternative sequence that is the amino acid sequence set forth in SEQ ID NO:2206 or that is an amino acid sequence at least 95%, at least 96%, at least 97%, at least 98%, or at least 99% identical to the amino acid sequence set forth in SEQ ID NO: 1) except that the amino acids from position 585 to 590 of SEQ ID NO:1 are replaced with the amino acid sequence of any one of SEQ ID NOs:A2-A19. The polypeptide can comprise the amino acid sequence of SEQ ID NO:1 (or an alternative sequence that is the amino acid sequence set forth in SEQ ID NO:2206 or that is an amino acid sequence at least 95%, at least 96%, at least 97%, at least 98%, or at least 99% identical to the amino acid sequence set forth in SEQ ID NO: 1) except that the amino acids from position 585 to 590 of SEQ ID NO:1 are replaced with the amino acid sequence of SEQ ID NO:A19. An AAV vector comprising the polypeptide can infect greater than 50 percent of foveal cones when a titer of at least 1×10⁷ of the vector is administered intravitreally to an eye of a human (or a non-human primate) (or a non-human primate). An AAV vector comprising the polypeptide can express more nucleic acid in foveal cones than the level of expression from a comparable AAV vector comprising a capsid polypeptide consisting of the amino acid sequence set forth in SEQ ID NO:1.

[0032] In another aspect, this document features a nucleic acid molecule encoding a vector. The nucleic acid molecule can be DNA. The vector can be an adeno-associated virus (AAV) vector comprising an AAV capsid polypeptide, wherein the capsid polypeptide comprises the amino acid sequence of any one of SEQ ID NOs:A2-A19. The capsid polypeptide can comprise the amino acid sequence of SEQ ID NO:1 (or an alternative sequence that is the amino acid sequence set forth in SEQ ID NO:2206 or that is an amino acid sequence at least 95%, at least 96%, at least 97%, at least 98%, or at least 99% identical to the amino acid sequence set forth in SEQ ID NO:1) except that the amino acid sequence of any one of SEQ ID NOs:A2-A19 is located between amino acid positions 587 and 588 of SEQ ID NO:1 (or the appropriate amino acid positions of the alternative sequence). The capsid polypeptide can comprise the amino acid sequence of SEQ ID NO:1 (or an alternative sequence that is the amino acid sequence set forth in SEQ ID NO:2206 or that is an amino acid sequence at least 95%, at least 96%, at least 97%, at least 98%, or at least 99% identical to the amino acid sequence set forth in SEQ ID NO:1) except that the amino acid sequence of any one of SEQ ID NOs:A2-A18 is located between amino acid positions 587 and 588 of SEQ ID NO:1 (or the appropriate amino acid positions of the alternative sequence). The capsid polypeptide can comprise the amino acid sequence of SEQ ID NO:1 (or an alternative sequence that is the amino acid sequence set forth in SEQ ID NO:2206 or that is an amino acid sequence at least 95%, at least 96%, at least 97%, at least 98%, or at least 99% identical to the amino acid sequence set forth in SEQ ID NO:1) except that the amino acids from position 585 to 590 of SEQ ID NO:1 are replaced with the amino acid sequence of any one of SEQ ID NOs:A2-A19. The capsid polypeptide can comprise the amino acid sequence of SEQ ID NO:1 (or an alternative sequence that is the amino acid sequence set forth in SEQ ID NO:2206 or that is an amino acid sequence at least 95%, at least 96%, at least 97%, at least 98%, or at least 99% identical to the amino acid sequence set forth in SEQ ID NO:1) except that the amino acids from position 585 to 590 of SEQ ID NO:1 are replaced with the amino acid sequence of SEQ ID NO:A19. The vector can be an AAV2 vector. The vector can infect greater than 50 percent of foveal cones when a titer of at least 1×10⁷ of the vector is administered intravitreally to an eye of a human (or a non-human primate). The vector can comprise an exogenous nucleic acid encoding an RNA or a polypeptide. The exogenous nucleic acid can encode an RNA. The RNA can be an siRNA or microRNA. The exogenous nucleic acid can encode a polypeptide. The polypeptide can be an ABCA4 polypeptide, a CRB1 polypeptide, an NPHP5 polypeptide, or an NR2E3 polypeptide. The vector can express more nucleic acid in foveal cones than the level of expression from a comparable AAV vector comprising a capsid polypeptide consisting of the amino acid sequence set forth in SEQ ID NO:1.

[0033] In another aspect, this document features a nucleic acid molecule encoding a polypeptide. The nucleic acid molecule can be DNA. The polypeptide can be an AAV capsid polypeptide comprising the amino acid sequence of any one of SEQ ID NOs:A2-A19. The polypeptide can comprise the amino acid sequence of SEQ ID NO:1 (or an alternative sequence that is the amino acid sequence set forth in SEQ ID NO:2206 or that is an amino acid sequence at least 95%, at least 96%, at least 97%, at least 98%, or at least 99% identical to the amino acid sequence set forth in SEQ ID NO:1) except that the amino acid sequence of any one of SEQ ID NOs:A2-A19 is located between amino acid positions 587 and 588 of SEQ ID NO:1 (or the appropriate amino acid positions of the alternative sequence). The polypeptide can comprise the amino acid sequence of SEQ ID NO:1 (or an alternative sequence that is the amino acid sequence set forth in SEQ ID NO:2206 or that is an amino acid sequence at least 95%, at least 96%, at least 97%, at least 98%, or at least 99% identical to the amino acid sequence set forth in SEQ ID NO:1) except that the amino acid sequence of any one of SEQ ID NOs:A2-A18 is located between amino acid positions 587 and 588 of SEQ ID NO:1 (or the appropriate amino acid positions of the alternative sequence). The polypeptide can comprise the amino acid sequence of SEQ ID NO:1 (or an alternative sequence that is the amino acid sequence set forth in SEQ ID NO:2206 or that is an amino acid sequence at least 95%, at least 96%, at least 97%, at least 98%, or at least 99% identical to the amino acid sequence set forth in SEQ ID NO: 1) except that the amino acids from position 585 to 590 of SEQ ID NO:1 are replaced with the amino acid sequence of any one of SEQ ID NOs:A2-A19. The polypeptide can comprise the amino acid sequence of SEQ ID NO:1 (or an alternative sequence that is the amino acid sequence set forth in SEQ ID NO:2206 or that is an amino acid sequence at least 95%, at least 96%, at least 97%, at least 98%, or at least 99% identical to the amino acid sequence set forth in SEQ ID NO: 1) except that the amino acids from position 585 to 590 of SEQ ID NO:1 are replaced with the amino acid sequence of SEQ ID NO:A19. An AAV vector comprising the polypeptide can infect greater than 50 percent of foveal cones when a titer of at least 1×10⁷ of the vector is administered intravitreally to an eye of a human (or a non-human primate). An AAV vector comprising the polypeptide can express more nucleic acid in foveal cones than the level of expression from a comparable AAV vector comprising a capsid polypeptide consisting of the amino acid sequence set forth in SEQ ID NO:1.

[0034] In another aspect, this document features a host cell comprising a nucleic acid molecule of either of the two preceding paragraphs. The host cell can express the vector. The host cell can express the polypeptide.

[0035] In another aspect, this document features a host cell comprising a vector. The host cell can be a retinal cell. The vector can be an adeno-associated virus (AAV) vector comprising an AAV capsid polypeptide, wherein the capsid polypeptide comprises the amino acid sequence of any one of SEQ ID NOs:A2-A19. The capsid polypeptide can comprise the amino acid sequence of SEQ ID NO:1 (or an alternative sequence that is the amino acid sequence set forth in SEQ ID NO:2206 or that is an amino acid sequence at least 95%, at least 96%, at least 97%, at least 98%, or at least 99% identical to the amino acid sequence set forth in SEQ ID NO: 1) except that the amino acid sequence of any one of SEQ ID NOs:A2-A19 is located between amino acid positions 587 and 588 of SEQ ID NO:1 (or the appropriate amino acid positions of the alternative sequence). The capsid polypeptide can comprise the amino acid sequence of SEQ ID NO:1 (or an alternative sequence that is the amino acid sequence set forth in SEQ ID NO:2206 or that is an amino acid sequence at least 95%, at least 96%, at least 97%, at least 98%, or at least 99% identical to the amino acid sequence set forth in SEQ ID NO:1) except that the amino acid sequence of any one of SEQ ID NOs:A2-A18 is located between amino acid positions 587 and 588 of SEQ ID NO:1 (or the appropriate amino acid positions of the alternative sequence). The capsid polypeptide can comprise the amino acid sequence of SEQ ID NO:1 (or an alternative sequence that is the amino acid sequence set forth in SEQ ID NO:2206 or that is an amino acid sequence at least 95%, at least 96%, at least 97%, at least 98%, or at least 99% identical to the amino acid sequence set forth in SEQ ID NO:1) except that the amino acids from position 585 to 590 of SEQ ID NO:1 are replaced with the amino acid sequence of any one of SEQ ID NOs:A2-A19. The capsid polypeptide can comprise the amino acid sequence of SEQ ID NO:1 (or an alternative sequence that is the amino acid sequence set forth in SEQ ID NO:2206 or that is an amino acid sequence at least 95%, at least 96%, at least 97%, at least 98%, or at least 99% identical to the amino acid sequence set forth in SEQ ID NO: 1) except that the amino acids from position 585 to 590 of SEQ ID NO:1 are replaced with the amino acid sequence of SEQ ID NO:A19. The vector can be an AAV2 vector. The vector can infect greater than 50 percent of foveal cones when a titer of at least 1×10⁷ of the vector is administered intravitreally to an eye of a human (or a non-human primate). The vector can comprise an exogenous nucleic acid encoding an RNA or a polypeptide. The exogenous nucleic acid can encode an RNA. The RNA can be an siRNA or microRNA. The exogenous nucleic acid can encode a polypeptide. The polypeptide can be an ABCA4 polypeptide, a CRB1 polypeptide, an NPHP5 polypeptide, or an NR2E3 polypeptide. The vector can express more nucleic acid in foveal cones than the level of expression from a comparable AAV vector comprising a capsid polypeptide consisting of the amino acid sequence set forth in SEQ ID NO:1.

[0036] In another aspect, this document features a host cell comprising a polypeptide. The host cell can be a retinal cell. The polypeptide can be an AAV capsid polypeptide comprising the amino acid sequence of any one of SEQ ID NOs:A2-A19. The polypeptide can comprise the amino acid sequence of SEQ ID NO:1 (or an alternative sequence that is the amino acid sequence set forth in SEQ ID NO:2206 or that is an amino acid sequence at least 95%, at least 96%, at least 97%, at least 98%, or at least 99% identical to the amino acid sequence set forth in SEQ ID NO:1) except that the amino acid sequence of any one of SEQ ID NOs:A2-A19 is located between amino acid positions 587 and 588 of SEQ ID NO:1 (or the appropriate amino acid positions of the alternative sequence). The polypeptide can comprise the amino acid sequence of SEQ ID NO:1 (or an alternative sequence that is the amino acid sequence set forth in SEQ ID NO:2206 or that is an amino acid sequence at least 95%, at least 96%, at least 97%, at least 98%, or at least 99% identical to the amino acid sequence set forth in SEQ ID NO:1) except that the amino acid sequence of any one of SEQ ID NOs:A2-A18 is located between amino acid positions 587 and 588 of SEQ ID NO:1 (or the appropriate amino acid positions of the alternative sequence). The polypeptide can comprise the amino acid sequence of SEQ ID NO:1 (or an alternative sequence that is the amino acid sequence set forth in SEQ ID NO:2206 or that is an amino acid sequence at least 95%, at least 96%, at least 97%, at least 98%, or at least 99% identical to the amino acid sequence set forth in SEQ ID NO: 1) except that the amino acids from position 585 to 590 of SEQ ID NO:1 are replaced with the amino acid sequence of any one of SEQ ID NOs:A2-A19. The polypeptide can comprise the amino acid sequence of SEQ ID NO:1 (or an alternative sequence that is the amino acid sequence set forth in SEQ ID NO:2206 or that is an amino acid sequence at least 95%, at least 96%, at least 97%, at least 98%, or at least 99% identical to the amino acid sequence set forth in SEQ ID NO: 1) except that the amino acids from position 585 to 590 of SEQ ID NO:1 are replaced with the amino acid sequence of SEQ ID NO:A19. An AAV vector comprising the polypeptide can infect greater than 50 percent of foveal cones when a titer of at least 1×10⁷ of the vector is administered intravitreally to an eye of a human (or a non-human primate). An AAV vector comprising the polypeptide can express more nucleic acid in foveal cones than the level of expression from a comparable AAV vector comprising a capsid polypeptide consisting of the amino acid sequence set forth in SEQ ID NO:1.

[0037] In another aspect, this document features a composition comprising an adeno-associated virus (AAV) vector comprising an AAV capsid polypeptide, wherein the capsid polypeptide comprises the amino acid sequence of any one of SEQ ID NOs:A2-A19. The capsid polypeptide can comprise the amino acid sequence of SEQ ID NO:1 (or an alternative sequence that is the amino acid sequence set forth in SEQ ID NO:2206 or that is an amino acid sequence at least 95%, at least 96%, at least 97%, at least 98%, or at least 99% identical to the amino acid sequence set forth in SEQ ID NO:1) except that the amino acid sequence of any one of SEQ ID NOs:A2-A19 is located between amino acid positions 587 and 588 of SEQ ID NO:1 (or the appropriate amino acid positions of the alternative sequence). The capsid polypeptide can comprise the amino acid sequence of SEQ ID NO:1 (or an alternative sequence that is the amino acid sequence set forth in SEQ ID NO:2206 or that is an amino acid sequence at least 95%, at least 96%, at least 97%, at least 98%, or at least 99% identical to the amino acid sequence set forth in SEQ ID NO:1) except that the amino acid sequence of any one of SEQ ID NOs:A2-A18 is located between amino acid positions 587 and 588 of SEQ ID NO:1 (or the appropriate amino acid positions of the alternative sequence). The capsid polypeptide can comprise the amino acid sequence of SEQ ID NO:1 (or an alternative sequence that is the amino acid sequence set forth in SEQ ID NO:2206 or that is an amino acid sequence at least 95%, at least 96%, at least 97%, at least 98%, or at least 99% identical to the amino acid sequence set forth in SEQ ID NO:1) except that the amino acids from position 585 to 590 of SEQ ID NO:1 are replaced with the amino acid sequence of any one of SEQ ID NOs:A2-A19. The capsid polypeptide can comprise the amino acid sequence of SEQ ID NO:1 (or an alternative sequence that is the amino acid sequence set forth in SEQ ID NO:2206 or that is an amino acid sequence at least 95%, at least 96%, at least 97%, at least 98%, or at least 99% identical to the amino acid sequence set forth in SEQ ID NO:1) except that the amino acids from position 585 to 590 of SEQ ID NO:1 are replaced with the amino acid sequence of SEQ ID NO:A19. The vector can be an AAV2 vector. The vector can infect greater than 50 percent of foveal cones when a titer of at least 1×10⁷ of the vector is administered intravitreally to an eye of a human (or a non-human primate). The vector can comprise an exogenous nucleic acid encoding an RNA or a polypeptide. The exogenous nucleic acid can encode an RNA. The RNA can be an siRNA or microRNA. The exogenous nucleic acid can encode a polypeptide. The polypeptide can be an ABCA4 polypeptide, a CRB1 polypeptide, an NPHP5 polypeptide, or an NR2E3 polypeptide. The vector can express more nucleic acid in foveal cones than the level of expression from a comparable AAV vector comprising a capsid polypeptide consisting of the amino acid sequence set forth in SEQ ID NO:1. The composition can comprise from about 1×10⁷ to about 1×10¹⁴ of the vector. The composition can comprise phosphate buffered saline, Hank's Balanced Salt Solution, or Pluronic F68.

[0038] In another aspect, this document features a method for delivering an exogenous nucleic acid sequence to a foveal cone within a mammal. The method comprises (or consists essentially of, or consists of) contacting the foveal cone with an AAV vector comprising an AAV capsid polypeptide and the exogenous nucleic acid sequence, wherein the capsid polypeptide comprises the amino acid sequence of any one of SEQ ID NOs:A2-A19, wherein the AAV vector infects the foveal cone, thereby delivering the exogenous nucleic acid sequence to the foveal cone. The capsid polypeptide can comprise the amino acid sequence of SEQ ID NO:1 (or an alternative sequence that is the amino acid sequence set forth in SEQ ID NO:2206 or that is an amino acid sequence at least 95%, at least 96%, at least 97%, at least 98%, or at least 99% identical to the amino acid sequence set forth in SEQ ID NO:1) except that the amino acid sequence of any one of SEQ ID NOs:A2-A19 is located between amino acid positions 587 and 588 of SEQ ID NO:1 (or the appropriate amino acid positions of the alternative sequence). The capsid polypeptide can comprise the amino acid sequence of SEQ ID NO:1 (or an alternative sequence that is the amino acid sequence set forth in SEQ ID NO:2206 or that is an amino acid sequence at least 95%, at least 96%, at least 97%, at least 98%, or at least 99% identical to the amino acid sequence set forth in SEQ ID NO:1) except that the amino acid sequence of any one of SEQ ID NOs:A2-A18 is located between amino acid positions 587 and 588 of SEQ ID NO:1 (or the appropriate amino acid positions of the alternative sequence). The capsid polypeptide can comprise the amino acid sequence of SEQ ID NO:1 (or an alternative sequence that is the amino acid sequence set forth in SEQ ID NO:2206 or that is an amino acid sequence at least 95%, at least 96%, at least 97%, at least 98%, or at least 99% identical to the amino acid sequence set forth in SEQ ID NO:1) except that the amino acids from position 585 to 590 of SEQ ID NO:1 are replaced with the amino acid sequence of any one of SEQ ID NOs:A2-A19. The capsid polypeptide can comprise the amino acid sequence of SEQ ID NO:1 (or an alternative sequence that is the amino acid sequence set forth in SEQ ID NO:2206 or that is an amino acid sequence at least 95%, at least 96%, at least 97%, at least 98%, or at least 99% identical to the amino acid sequence set forth in SEQ ID NO:1) except that the amino acids from position 585 to 590 of SEQ ID NO:1 are replaced with the amino acid sequence of SEQ ID NO:A19. The mammal can be a human (or a non-human primate). The vector can be an AAV2 vector. The vector can infect greater than 50 percent of foveal cones when a titer of at least 1×10⁷ of the vector is administered intravitreally to an eye of a human (or a non-human primate). The exogenous nucleic acid sequence can encode an RNA or a polypeptide. The exogenous nucleic acid can encode an RNA. The RNA can be an siRNA or microRNA. The exogenous nucleic acid can encode a polypeptide. The polypeptide can be an ABCA4 polypeptide, a CRB1 polypeptide, an NPHP5 polypeptide, or an NR2E3 polypeptide. The vector can express more of the exogenous nucleic acid sequence in the foveal cone than the level of expression in a foveal cone from a comparable AAV vector comprising a capsid polypeptide consisting of the amino acid sequence set forth in SEQ ID NO:1. The method can comprise intravitreally administering a composition comprising the vector to the mammal, thereby contacting the foveal cone with the vector. The composition can comprise from about 1×10⁷ to about 1×10¹⁴ of the vector.

[0039] In another aspect, this document features a method for treating a retinal condition. The method comprises (or consists essentially of, or consists of) contacting foveal cones of a mammal having the retinal condition with AAV vectors comprising an AAV capsid polypeptide and an exogenous nucleic acid sequence, wherein the capsid polypeptide comprises the amino acid sequence of any one of SEQ ID NOs:A2-A19, wherein the AAV vectors infect the foveal cones and drive expression of the exogenous nucleic acid sequence within the foveal cones, thereby treating the retinal condition. The mammal can be a human (or a non-human primate). The retinal condition can be selected from the group consisting of cone dystrophy, cone/rod dystrophy, retinitis pigmentosa, macular degeneration, achromatopsia, blue cone monochromcy, and color blindness. The capsid polypeptide can comprise the amino acid sequence of SEQ ID NO:1 (or an alternative sequence that is the amino acid sequence set forth in SEQ ID NO:2206 or that is an amino acid sequence at least 95%, at least 96%, at least 97%, at least 98%, or at least 99% identical to the amino acid sequence set forth in SEQ ID NO:1) except that the amino acid sequence of any one of SEQ ID NOs:A2-A19 is located between amino acid positions 587 and 588 of SEQ ID NO:1 (or the appropriate amino acid positions of the alternative sequence). The capsid polypeptide can comprise the amino acid sequence of SEQ ID NO:1 (or an alternative sequence that is the amino acid sequence set forth in SEQ ID NO:2206 or that is an amino acid sequence at least 95%, at least 96%, at least 97%, at least 98%, or at least 99% identical to the amino acid sequence set forth in SEQ ID NO:1) except that the amino acid sequence of any one of SEQ ID NOs:A2-A18 is located between amino acid positions 587 and 588 of SEQ ID NO:1 (or the appropriate amino acid positions of the alternative sequence). The capsid polypeptide can comprise the amino acid sequence of SEQ ID NO:1 (or an alternative sequence that is the amino acid sequence set forth in SEQ ID NO:2206 or that is an amino acid sequence at least 95%, at least 96%, at least 97%, at least 98%, or at least 99% identical to the amino acid sequence set forth in SEQ ID NO:1) except that the amino acids from position 585 to 590 of SEQ ID NO: 1 are replaced with the amino acid sequence of any one of SEQ ID NOs:A2-A19. The capsid polypeptide can comprise the amino acid sequence of SEQ ID NO:1 (or an alternative sequence that is the amino acid sequence set forth in SEQ ID NO:2206 or that is an amino acid sequence at least 95%, at least 96%, at least 97%, at least 98%, or at least 99% identical to the amino acid sequence set forth in SEQ ID NO:1) except that the amino acids from position 585 to 590 of SEQ ID NO:1 are replaced with the amino acid sequence of SEQ ID NO:A19. The vectors can be AAV2 vectors. The vectors can infect greater than 50 percent of foveal cones when a titer of at least 1×10⁷ of the vectors is administered intravitreally to an eye of the mammal. The exogenous nucleic acid sequence can encode an RNA. The RNA can be an siRNA or a microRNA. The exogenous nucleic acid can encode a polypeptide. The polypeptide can be an ABCA4 polypeptide, a CRB1 polypeptide, an NPHP5 polypeptide, and an NR2E3 polypeptide.

[0040] The vectors can express more of the exogenous nucleic acid sequence in the foveal cones than the level of expression in foveal cones from a comparable AAV vector comprising a capsid polypeptide consisting of the amino acid sequence set forth in SEQ ID NO:1. The method can comprise intravitreally administering a composition comprising the vectors to the mammal, thereby contacting the foveal cones with the vectors. The composition can comprise from about 1×10⁷ to about 1×10¹⁴ of the vectors.

[0041] In another aspect, this document features an adeno-associated virus (AAV) vector comprising an AAV capsid polypeptide, wherein the capsid polypeptide comprises the amino acid sequence of any one of SEQ ID NOs:B2-B317. The capsid polypeptide can comprise the amino acid sequence of SEQ ID NO:1 (or an alternative sequence that is the amino acid sequence set forth in SEQ ID NO:2206 or that is an amino acid sequence at least 95%, at least 96%, at least 97%, at least 98%, or at least 99% identical to the amino acid sequence set forth in SEQ ID NO:1) except that the amino acid sequence of any one of SEQ ID NOs:B2-B317 is located between amino acid positions 587 and 588 of SEQ ID NO:1 (or the appropriate amino acid positions of the alternative sequence). The capsid polypeptide can comprise the amino acid sequence of SEQ ID NO:1 (or an alternative sequence that is the amino acid sequence set forth in SEQ ID NO:2206 or that is an amino acid sequence at least 95%, at least 96%, at least 97%, at least 98%, or at least 99% identical to the amino acid sequence set forth in SEQ ID NO:1) except that the amino acid sequence of any one of SEQ ID NOs:B2-B298 is located between amino acid positions 587 and 588 of SEQ ID NO:1 (or the appropriate amino acid positions of the alternative sequence). The capsid polypeptide can comprise the amino acid sequence of SEQ ID NO:1 (or an alternative sequence that is the amino acid sequence set forth in SEQ ID NO:2206 or that is an amino acid sequence at least 95%, at least 96%, at least 97%, at least 98%, or at least 99% identical to the amino acid sequence set forth in SEQ ID NO:1) except that the amino acids from position 585 to 590 of SEQ ID NO:1 are replaced with the amino acid sequence of any one of SEQ ID NOs:B2-B317. The capsid polypeptide can comprise the amino acid sequence of SEQ ID NO:1 (or an alternative sequence that is the amino acid sequence set forth in SEQ ID NO:2206 or that is an amino acid sequence at least 95%, at least 96%, at least 97%, at least 98%, or at least 99% identical to the amino acid sequence set forth in SEQ ID NO:1) except that the amino acids from position 585 to 590 of SEQ ID NO:1 are replaced with the amino acid sequence of any one of SEQ ID NOs:B299-B317. The vector can be an AAV2 vector. The vector can infect greater than 2.5 percent of retinal cells when a titer of at least 1×10⁷ of the vector is administered intravitreally to an eye of a human (or a non-human primate). The vector can comprise an exogenous nucleic acid encoding an RNA or a polypeptide. The exogenous nucleic acid can encode an RNA. The RNA can be an siRNA or microRNA. The exogenous nucleic acid can encode a polypeptide. The polypeptide can be an ABCA4 polypeptide, a CRB1 polypeptide, an NPHP5 polypeptide, or an NR2E3 polypeptide. The vector can express more nucleic acid in retinal cells than the level of expression from a comparable AAV vector comprising a capsid polypeptide consisting of the amino acid sequence set forth in SEQ ID NO:1.

[0042] In another aspect, this document features an AAV capsid polypeptide comprising the amino acid sequence of any one of SEQ ID NOs:B2-B317. The polypeptide can comprise the amino acid sequence of SEQ ID NO:1 (or an alternative sequence that is the amino acid sequence set forth in SEQ ID NO:2206 or that is an amino acid sequence at least 95%, at least 96%, at least 97%, at least 98%, or at least 99% identical to the amino acid sequence set forth in SEQ ID NO:1) except that the amino acid sequence of any one of SEQ ID NOs:B2-B317 is located between amino acid positions 587 and 588 of SEQ ID NO:1 (or the appropriate amino acid positions of the alternative sequence). The polypeptide can comprise the amino acid sequence of SEQ ID NO:1 (or an alternative sequence that is the amino acid sequence set forth in SEQ ID NO:2206 or that is an amino acid sequence at least 95%, at least 96%, at least 97%, at least 98%, or at least 99% identical to the amino acid sequence set forth in SEQ ID NO:1) except that the amino acid sequence of any one of SEQ ID NOs:B2-B298 is located between amino acid positions 587 and 588 of SEQ ID NO:1 (or the appropriate amino acid positions of the alternative sequence). The polypeptide can comprise the amino acid sequence of SEQ ID NO:1 (or an alternative sequence that is the amino acid sequence set forth in SEQ ID NO:2206 or that is an amino acid sequence at least 95%, at least 96%, at least 97%, at least 98%, or at least 99% identical to the amino acid sequence set forth in SEQ ID NO: 1) except that the amino acids from position 585 to 590 of SEQ ID NO:1 are replaced with the amino acid sequence of any one of SEQ ID NOs:B2-B317. The polypeptide can comprise the amino acid sequence of SEQ ID NO:1 (or an alternative sequence that is the amino acid sequence set forth in SEQ ID NO:2206 or that is an amino acid sequence at least 95%, at least 96%, at least 97%, at least 98%, or at least 99% identical to the amino acid sequence set forth in SEQ ID NO:1) except that the amino acids from position 585 to 590 of SEQ ID NO:1 are replaced with the amino acid sequence of any one of SEQ ID NOs:B299-B317. An AAV vector comprising the polypeptide can infect greater than 2.5 percent of retinal cells when a titer of at least 1×10⁷ of the vector is administered intravitreally to an eye of a human (or a non-human primate). An AAV vector comprising the polypeptide can express more nucleic acid in retinal cells than the level of expression from a comparable AAV vector comprising a capsid polypeptide consisting of the amino acid sequence set forth in SEQ ID NO:1.

[0043] In another aspect, this document features a nucleic acid molecule encoding an AAV vector comprising an AAV capsid polypeptide, wherein the capsid polypeptide comprises the amino acid sequence of any one of SEQ ID NOs:B2-B317. The capsid polypeptide can comprise the amino acid sequence of SEQ ID NO:1 (or an alternative sequence that is the amino acid sequence set forth in SEQ ID NO:2206 or that is an amino acid sequence at least 95%, at least 96%, at least 97%, at least 98%, or at least 99% identical to the amino acid sequence set forth in SEQ ID NO:1) except that the amino acid sequence of any one of SEQ ID NOs:B2-B317 is located between amino acid positions 587 and 588 of SEQ ID NO:1 (or the appropriate amino acid positions of the alternative sequence). The capsid polypeptide can comprise the amino acid sequence of SEQ ID NO:1 (or an alternative sequence that is the amino acid sequence set forth in SEQ ID NO:2206 or that is an amino acid sequence at least 95%, at least 96%, at least 97%, at least 98%, or at least 99% identical to the amino acid sequence set forth in SEQ ID NO:1) except that the amino acid sequence of any one of SEQ ID NOs:B2-B298 is located between amino acid positions 587 and 588 of SEQ ID NO:1 (or the appropriate amino acid positions of the alternative sequence). The capsid polypeptide can comprise the amino acid sequence of SEQ ID NO:1 (or an alternative sequence that is the amino acid sequence set forth in SEQ ID NO:2206 or that is an amino acid sequence at least 95%, at least 96%, at least 97%, at least 98%, or at least 99% identical to the amino acid sequence set forth in SEQ ID NO:1) except that the amino acids from position 585 to 590 of SEQ ID NO:1 are replaced with the amino acid sequence of any one of SEQ ID NOs:B2-B317. The capsid polypeptide can comprise the amino acid sequence of SEQ ID NO:1 (or an alternative sequence that is the amino acid sequence set forth in SEQ ID NO:2206 or that is an amino acid sequence at least 95%, at least 96%, at least 97%, at least 98%, or at least 99% identical to the amino acid sequence set forth in SEQ ID NO:1) except that the amino acids from position 585 to 590 of SEQ ID NO:1 are replaced with the amino acid sequence of any one of SEQ ID NOs:B299-B317. The vector can be an AAV2 vector. The vector can infect greater than 2.5 percent of retinal cells when a titer of at least 1×10⁷ of the vector is administered intravitreally to an eye of a human (or a non-human primate). The vector can comprise an exogenous nucleic acid encoding an RNA or a polypeptide. The exogenous nucleic acid can encode an RNA. The RNA can be an siRNA or microRNA. The exogenous nucleic acid can encode a polypeptide. The polypeptide can be an ABCA4 polypeptide, a CRB1 polypeptide, an NPHP5 polypeptide, or an NR2E3 polypeptide. The vector can express more nucleic acid in retinal cells than the level of expression from a comparable AAV vector comprising a capsid polypeptide consisting of the amino acid sequence set forth in SEQ ID NO:1. The nucleic acid molecule can be DNA.

[0044] In another aspect, this document features a nucleic acid molecule encoding an AAV capsid polypeptide comprising the amino acid sequence of any one of SEQ ID NOs:B2-B317. The polypeptide can comprise the amino acid sequence of SEQ ID NO:1 (or an alternative sequence that is the amino acid sequence set forth in SEQ ID NO:2206 or that is an amino acid sequence at least 95%, at least 96%, at least 97%, at least 98%, or at least 99% identical to the amino acid sequence set forth in SEQ ID NO:1) except that the amino acid sequence of any one of SEQ ID NOs:B2-B317 is located between amino acid positions 587 and 588 of SEQ ID NO:1 (or the appropriate amino acid positions of the alternative sequence). The polypeptide can comprise the amino acid sequence of SEQ ID NO:1 (or an alternative sequence that is the amino acid sequence set forth in SEQ ID NO:2206 or that is an amino acid sequence at least 95%, at least 96%, at least 97%, at least 98%, or at least 99% identical to the amino acid sequence set forth in SEQ ID NO:1) except that the amino acid sequence of any one of SEQ ID NOs:B2-B298 is located between amino acid positions 587 and 588 of SEQ ID NO:1 (or the appropriate amino acid positions of the alternative sequence). The polypeptide can comprise the amino acid sequence of SEQ ID NO:1 (or an alternative sequence that is the amino acid sequence set forth in SEQ ID NO:2206 or that is an amino acid sequence at least 95%, at least 96%, at least 97%, at least 98%, or at least 99% identical to the amino acid sequence set forth in SEQ ID NO:1) except that the amino acids from position 585 to 590 of SEQ ID NO:1 are replaced with the amino acid sequence of any one of SEQ ID NOs:B2-B317. The polypeptide can comprise the amino acid sequence of SEQ ID NO:1 (or an alternative sequence that is the amino acid sequence set forth in SEQ ID NO:2206 or that is an amino acid sequence at least 95%, at least 96%, at least 97%, at least 98%, or at least 99% identical to the amino acid sequence set forth in SEQ ID NO:1) except that the amino acids from position 585 to 590 of SEQ ID NO:1 are replaced with the amino acid sequence of any one of SEQ ID NOs:B299-B317. An AAV vector comprising the polypeptide can infect greater than 2.5 percent of retinal cells when a titer of at least 1×10⁷ of the vector is administered intravitreally to an eye of a human (or a non-human primate). An AAV vector comprising the polypeptide can express more nucleic acid in retinal cells than the level of expression from a comparable AAV vector comprising a capsid polypeptide consisting of the amino acid sequence set forth in SEQ ID NO:1. The nucleic acid molecule can be DNA.

[0045] In another aspect, this document features a host cell comprising a nucleic acid molecule of either of the two preceding paragraphs. The host cell can express the vector. The host cell can express the polypeptide.

[0046] In another aspect, this document features a host cell comprising an AAV vector comprising an AAV capsid polypeptide, wherein the capsid polypeptide comprises the amino acid sequence of any one of SEQ ID NOs:B2-B317. The capsid polypeptide can comprise the amino acid sequence of SEQ ID NO:1 (or an alternative sequence that is the amino acid sequence set forth in SEQ ID NO:2206 or that is an amino acid sequence at least 95%, at least 96%, at least 97%, at least 98%, or at least 99% identical to the amino acid sequence set forth in SEQ ID NO:1) except that the amino acid sequence of any one of SEQ ID NOs:B2-B317 is located between amino acid positions 587 and 588 of SEQ ID NO:1 (or the appropriate amino acid positions of the alternative sequence). The capsid polypeptide can comprise the amino acid sequence of SEQ ID NO:1 (or an alternative sequence that is the amino acid sequence set forth in SEQ ID NO:2206 or that is an amino acid sequence at least 95%, at least 96%, at least 97%, at least 98%, or at least 99% identical to the amino acid sequence set forth in SEQ ID NO:1) except that the amino acid sequence of any one of SEQ ID NOs:B2-B298 is located between amino acid positions 587 and 588 of SEQ ID NO:1 (or the appropriate amino acid positions of the alternative sequence). The capsid polypeptide can comprise the amino acid sequence of SEQ ID NO:1 (or an alternative sequence that is the amino acid sequence set forth in SEQ ID NO:2206 or that is an amino acid sequence at least 95%, at least 96%, at least 97%, at least 98%, or at least 99% identical to the amino acid sequence set forth in SEQ ID NO:1) except that the amino acids from position 585 to 590 of SEQ ID NO:1 are replaced with the amino acid sequence of any one of SEQ ID NOs:B2-B317. The capsid polypeptide can comprise the amino acid sequence of SEQ ID NO:1 (or an alternative sequence that is the amino acid sequence set forth in SEQ ID NO:2206 or that is an amino acid sequence at least 95%, at least 96%, at least 97%, at least 98%, or at least 99% identical to the amino acid sequence set forth in SEQ ID NO:1) except that the amino acids from position 585 to 590 of SEQ ID NO:1 are replaced with the amino acid sequence of any one of SEQ ID NOs:B299-B317. The vector can be an AAV2 vector. The vector can infect greater than 2.5 percent of retinal cells when a titer of at least 1×10⁷ of the vector is administered intravitreally to an eye of a human (or a non-human primate). The vector can comprise an exogenous nucleic acid encoding an RNA or a polypeptide. The exogenous nucleic acid can encode an RNA. The RNA can be an siRNA or microRNA. The exogenous nucleic acid can encode a polypeptide. The polypeptide can be an ABCA4 polypeptide, a CRB1 polypeptide, an NPHP5 polypeptide, or an NR2E3 polypeptide. The vector can express more nucleic acid in retinal cells than the level of expression from a comparable AAV vector comprising a capsid polypeptide consisting of the amino acid sequence set forth in SEQ ID NO:1. The host cell can be a retinal cell.

[0047] In another aspect, this document features a host cell comprising an AAV capsid polypeptide comprising the amino acid sequence of any one of SEQ ID NOs:B2-B317. The polypeptide can comprise the amino acid sequence of SEQ ID NO:1 (or an alternative sequence that is the amino acid sequence set forth in SEQ ID NO:2206 or that is an amino acid sequence at least 95%, at least 96%, at least 97%, at least 98%, or at least 99% identical to the amino acid sequence set forth in SEQ ID NO:1) except that the amino acid sequence of any one of SEQ ID NOs:B2-B317 is located between amino acid positions 587 and 588 of SEQ ID NO:1 (or the appropriate amino acid positions of the alternative sequence). The polypeptide can comprise the amino acid sequence of SEQ ID NO:1 (or an alternative sequence that is the amino acid sequence set forth in SEQ ID NO:2206 or that is an amino acid sequence at least 95%, at least 96%, at least 97%, at least 98%, or at least 99% identical to the amino acid sequence set forth in SEQ ID NO:1) except that the amino acid sequence of any one of SEQ ID NOs:B2-B298 is located between amino acid positions 587 and 588 of SEQ ID NO:1 (or the appropriate amino acid positions of the alternative sequence). The polypeptide can comprise the amino acid sequence of SEQ ID NO:1 (or an alternative sequence that is the amino acid sequence set forth in SEQ ID NO:2206 or that is an amino acid sequence at least 95%, at least 96%, at least 97%, at least 98%, or at least 99% identical to the amino acid sequence set forth in SEQ ID NO:1) except that the amino acids from position 585 to 590 of SEQ ID NO:1 are replaced with the amino acid sequence of any one of SEQ ID NOs:B2-B317. The polypeptide can comprise the amino acid sequence of SEQ ID NO:1 (or an alternative sequence that is the amino acid sequence set forth in SEQ ID NO:2206 or that is an amino acid sequence at least 95%, at least 96%, at least 97%, at least 98%, or at least 99% identical to the amino acid sequence set forth in SEQ ID NO:1) except that the amino acids from position 585 to 590 of SEQ ID NO:1 are replaced with the amino acid sequence of any one of SEQ ID NOs:B299-B317. An AAV vector comprising the polypeptide can infect greater than 2.5 percent of retinal cells when a titer of at least 1×10⁷ of the vector is administered intravitreally to an eye of a human (or a non-human primate). An AAV vector comprising the polypeptide can express more nucleic acid in retinal cells than the level of expression from a comparable AAV vector comprising a capsid polypeptide consisting of the amino acid sequence set forth in SEQ ID NO:1. The host cell can be a retinal cell.

[0048] In another aspect, this document features a composition comprising an AAV vector comprising an AAV capsid polypeptide, wherein the capsid polypeptide comprises the amino acid sequence of any one of SEQ ID NOs:B2-B317. The capsid polypeptide can comprise the amino acid sequence of SEQ ID NO:1 (or an alternative sequence that is the amino acid sequence set forth in SEQ ID NO:2206 or that is an amino acid sequence at least 95%, at least 96%, at least 97%, at least 98%, or at least 99% identical to the amino acid sequence set forth in SEQ ID NO:1) except that the amino acid sequence of any one of SEQ ID NOs:B2-B317 is located between amino acid positions 587 and 588 of SEQ ID NO:1 (or the appropriate amino acid positions of the alternative sequence). The capsid polypeptide can comprise the amino acid sequence of SEQ ID NO:1 (or an alternative sequence that is the amino acid sequence set forth in SEQ ID NO:2206 or that is an amino acid sequence at least 95%, at least 96%, at least 97%, at least 98%, or at least 99% identical to the amino acid sequence set forth in SEQ ID NO:1) except that the amino acid sequence of any one of SEQ ID NOs:B2-B298 is located between amino acid positions 587 and 588 of SEQ ID NO:1 (or the appropriate amino acid positions of the alternative sequence). The capsid polypeptide can comprise the amino acid sequence of SEQ ID NO:1 (or an alternative sequence that is the amino acid sequence set forth in SEQ ID NO:2206 or that is an amino acid sequence at least 95%, at least 96%, at least 97%, at least 98%, or at least 99% identical to the amino acid sequence set forth in SEQ ID NO:1) except that the amino acids from position 585 to 590 of SEQ ID NO:1 are replaced with the amino acid sequence of any one of SEQ ID NOs:B2-B317. The capsid polypeptide can comprise the amino acid sequence of SEQ ID NO:1 (or an alternative sequence that is the amino acid sequence set forth in SEQ ID NO:2206 or that is an amino acid sequence at least 95%, at least 96%, at least 97%, at least 98%, or at least 99% identical to the amino acid sequence set forth in SEQ ID NO:1) except that the amino acids from position 585 to 590 of SEQ ID NO:1 are replaced with the amino acid sequence of any one of SEQ ID NOs:B299-B317. The vector can be an AAV2 vector. The vector can infect greater than 2.5 percent of retinal cells when a titer of at least 1×10⁷ of the vector is administered intravitreally to an eye of a human (or a non-human primate). The vector can comprise an exogenous nucleic acid encoding an RNA or a polypeptide. The exogenous nucleic acid can encode an RNA. The RNA can be an siRNA or microRNA. The exogenous nucleic acid can encode a polypeptide. The polypeptide can be an ABCA4 polypeptide, a CRB1 polypeptide, an NPHP5 polypeptide, or an NR2E3 polypeptide. The vector can express more nucleic acid in retinal cells than the level of expression from a comparable AAV vector comprising a capsid polypeptide consisting of the amino acid sequence set forth in SEQ ID NO:1. The composition can comprise from about 1×10⁷ to about 1×10¹⁴ of the vector. The composition can comprise phosphate buffered saline, Hank's Balanced Salt Solution, or Pluronic F68.

[0049] In another aspect, this document features a method for delivering an exogenous nucleic acid sequence to a retinal cell within a mammal. The method comprises (or consists essentially of, or consists of) contacting the retinal cell with an AAV vector comprising an AAV capsid polypeptide and the exogenous nucleic acid sequence, wherein the capsid polypeptide comprises the amino acid sequence of any one of SEQ ID NOs:B2-B317, wherein the AAV vector infects the retinal cell, thereby delivering the exogenous nucleic acid sequence to the retinal cell. The capsid polypeptide can comprise the amino acid sequence of SEQ ID NO:1 (or an alternative sequence that is the amino acid sequence set forth in SEQ ID NO:2206 or that is an amino acid sequence at least 95%, at least 96%, at least 97%, at least 98%, or at least 99% identical to the amino acid sequence set forth in SEQ ID NO:1) except that the amino acid sequence of any one of SEQ ID NOs:B2-B317 is located between amino acid positions 587 and 588 of SEQ ID NO:1 (or the appropriate amino acid positions of the alternative sequence). The capsid polypeptide can comprise the amino acid sequence of SEQ ID NO:1 (or an alternative sequence that is the amino acid sequence set forth in SEQ ID NO:2206 or that is an amino acid sequence at least 95%, at least 96%, at least 97%, at least 98%, or at least 99% identical to the amino acid sequence set forth in SEQ ID NO:1) except that the amino acid sequence of any one of SEQ ID NOs:B2-B298 is located between amino acid positions 587 and 588 of SEQ ID NO:1 (or the appropriate amino acid positions of the alternative sequence). The capsid polypeptide can comprise the amino acid sequence of SEQ ID NO:1 (or an alternative sequence that is the amino acid sequence set forth in SEQ ID NO:2206 or that is an amino acid sequence at least 95%, at least 96%, at least 97%, at least 98%, or at least 99% identical to the amino acid sequence set forth in SEQ ID NO:1) except that the amino acids from position 585 to 590 of SEQ ID NO:1 are replaced with the amino acid sequence of any one of SEQ ID NOs:B2-B317. The capsid polypeptide can comprise the amino acid sequence of SEQ ID NO:1 (or an alternative sequence that is the amino acid sequence set forth in SEQ ID NO:2206 or that is an amino acid sequence at least 95%, at least 96%, at least 97%, at least 98%, or at least 99% identical to the amino acid sequence set forth in SEQ ID NO:1) except that the amino acids from position 585 to 590 of SEQ ID NO:1 are replaced with the amino acid sequence of any one of SEQ ID NOs:B299-B317. The mammal can be a human (or a non-human primate). The vector can be an AAV2 vector. The vector can infect greater than 2.5 percent of retinal cells when a titer of at least 1×10⁷ of the vector is administered intravitreally to an eye of a human (or a non-human primate). The exogenous nucleic acid sequence can encode an RNA or a polypeptide. The exogenous nucleic acid can encode an RNA. The RNA can be an siRNA or microRNA. The exogenous nucleic acid can encode a polypeptide. The polypeptide can be an ABCA4 polypeptide, a CRB1 polypeptide, an NPHP5 polypeptide, or an NR2E3 polypeptide. The vector can express more of the exogenous nucleic acid sequence in the retinal cell than the level of expression in a retinal cell from a comparable AAV vector comprising a capsid polypeptide consisting of the amino acid sequence set forth in SEQ ID NO:1. The method can comprise intravitreally administering a composition comprising the vector to the mammal, thereby contacting the retinal cell with the vector. The composition can comprise from about 1×10⁷ to about 1×10¹⁴ of the vector.

[0050] In another aspect, this document features a method for treating a retinal condition. The method comprises (or consists essentially of, or consists of) contacting retinal cells of a mammal having the retinal condition with AAV vectors comprising an AAV capsid polypeptide and an exogenous nucleic acid sequence, wherein the capsid polypeptide comprises the amino acid sequence of any one of SEQ ID NOs:B2-B317, wherein the AAV vectors infect the retinal cells and drive expression of the exogenous nucleic acid sequence within the retinal cells, thereby treating the retinal condition. The mammal can be a human (or a non-human primate). The retinal condition can be selected from the group consisting of LCA, OCA1, retinitis pigmentosa, rod/cone dystrophy, cone dystrophy, Stargardt Disease, Usher syndrome, XLRP, and XLRS. The capsid polypeptide can comprise the amino acid sequence of SEQ ID NO:1 (or an alternative sequence that is the amino acid sequence set forth in SEQ ID NO:2206 or that is an amino acid sequence at least 95%, at least 96%, at least 97%, at least 98%, or at least 99% identical to the amino acid sequence set forth in SEQ ID NO:1) except that the amino acid sequence of any one of SEQ ID NOs:B2-B317 is located between amino acid positions 587 and 588 of SEQ ID NO:1 (or the appropriate amino acid positions of the alternative sequence). The capsid polypeptide can comprise the amino acid sequence of SEQ ID NO:1 (or an alternative sequence that is the amino acid sequence set forth in SEQ ID NO:2206 or that is an amino acid sequence at least 95%, at least 96%, at least 97%, at least 98%, or at least 99% identical to the amino acid sequence set forth in SEQ ID NO:1) except that the amino acid sequence of any one of SEQ ID NOs:B2-B298 is located between amino acid positions 587 and 588 of SEQ ID NO:1 (or the appropriate amino acid positions of the alternative sequence). The capsid polypeptide can comprise the amino acid sequence of SEQ ID NO:1 (or an alternative sequence that is the amino acid sequence set forth in SEQ ID NO:2206 or that is an amino acid sequence at least 95%, at least 96%, at least 97%, at least 98%, or at least 99% identical to the amino acid sequence set forth in SEQ ID NO:1) except that the amino acids from position 585 to 590 of SEQ ID NO: 1 are replaced with the amino acid sequence of any one of SEQ ID NOs:B2-B317. The capsid polypeptide can comprise the amino acid sequence of SEQ ID NO:1 (or an alternative sequence that is the amino acid sequence set forth in SEQ ID NO:2206 or that is an amino acid sequence at least 95%, at least 96%, at least 97%, at least 98%, or at least 99% identical to the amino acid sequence set forth in SEQ ID NO:1) except that the amino acids from position 585 to 590 of SEQ ID NO:1 are replaced with the amino acid sequence of any one of SEQ ID NOs:B299-B317. The vectors can be AAV2 vectors. The vectors can infect greater than 2.5 percent of retinal cells when a titer of at least 1×10⁷ of the vectors is administered intravitreally to an eye of the mammal. The exogenous nucleic acid sequence can encode an RNA. The RNA can be an siRNA or a microRNA. The exogenous nucleic acid can encode a polypeptide. The polypeptide can be an ABCA4 polypeptide, a CRB1 polypeptide, an NPHP5 polypeptide, and an NR2E3 polypeptide. The vectors can express more of the exogenous nucleic acid sequence in the retinal cells than the level of expression in retinal cells from a comparable AAV vector comprising a capsid polypeptide consisting of the amino acid sequence set forth in SEQ ID NO:1. The method can comprise intravitreally administering a composition comprising the vectors to the mammal, thereby contacting the retinal cells with the vectors. The composition can comprise from about 1×10⁷ to about 1×10¹⁴ of the vectors.

[0051] In another aspect, this document features an adeno-associated virus (AAV) vector comprising an AAV capsid polypeptide, wherein the capsid polypeptide comprises the amino acid sequence of any one of SEQ ID NOs:C2-C45. The capsid polypeptide can comprise the amino acid sequence of SEQ ID NO:1 (or an alternative sequence that is the amino acid sequence set forth in SEQ ID NO:2206 or that is an amino acid sequence at least 95%, at least 96%, at least 97%, at least 98%, or at least 99% identical to the amino acid sequence set forth in SEQ ID NO:1) except that the amino acid sequence of any one of SEQ ID NOs:C2-C45 is located between amino acid positions 587 and 588 of SEQ ID NO:1 (or the appropriate amino acid positions of the alternative sequence). The capsid polypeptide can comprise the amino acid sequence of SEQ ID NO:1 (or an alternative sequence that is the amino acid sequence set forth in SEQ ID NO:2206 or that is an amino acid sequence at least 95%, at least 96%, at least 97%, at least 98%, or at least 99% identical to the amino acid sequence set forth in SEQ ID NO:1) except that the amino acid sequence of any one of SEQ ID NOs:C2-C43 is located between amino acid positions 587 and 588 of SEQ ID NO:1 (or the appropriate amino acid positions of the alternative sequence). The capsid polypeptide can comprise the amino acid sequence of SEQ ID NO:1 (or an alternative sequence that is the amino acid sequence set forth in SEQ ID NO:2206 or that is an amino acid sequence at least 95%, at least 96%, at least 97%, at least 98%, or at least 99% identical to the amino acid sequence set forth in SEQ ID NO:1) except that the amino acids from position 585 to 590 of SEQ ID NO:1 are replaced with the amino acid sequence of any one of SEQ ID NOs:C2-C45. The capsid polypeptide can comprise the amino acid sequence of SEQ ID NO:1 (or an alternative sequence that is the amino acid sequence set forth in SEQ ID NO:2206 or that is an amino acid sequence at least 95%, at least 96%, at least 97%, at least 98%, or at least 99% identical to the amino acid sequence set forth in SEQ ID NO:1) except that the amino acids from position 585 to 590 of SEQ ID NO:1 are replaced with the amino acid sequence of any one of SEQ ID NOs:C44-C45. The vector can be an AAV2 vector. The vector can infect greater than 2 percent of retinal cells within two or more retinal regions when a titer of at least 1×10⁷ of the vector is administered intravitreally to an eye of a human (or a non-human primate). The vector can comprise an exogenous nucleic acid encoding an RNA or a polypeptide. The exogenous nucleic acid can encode an RNA. The RNA can be an siRNA or microRNA. The exogenous nucleic acid can encode a polypeptide. The polypeptide can be an ABCA4 polypeptide, a CRB1 polypeptide, an NPHP5 polypeptide, or an NR2E3 polypeptide. The vector can express more nucleic acid in retinal cells in at least two retinal regions than the level of expression from a comparable AAV vector comprising a capsid polypeptide consisting of the amino acid sequence set forth in SEQ ID NO:1, wherein the at least two retinal regions are selected from the group consisting of a fovea region, a parafovea region, a vascular arcade region, and a periphery region.

[0052] In another aspect, this document features an AAV capsid polypeptide comprising the amino acid sequence of any one of SEQ ID NOs:C2-C45. The capsid polypeptide can comprise the amino acid sequence of SEQ ID NO:1 (or an alternative sequence that is the amino acid sequence set forth in SEQ ID NO:2206 or that is an amino acid sequence at least 95%, at least 96%, at least 97%, at least 98%, or at least 99% identical to the amino acid sequence set forth in SEQ ID NO:1) except that the amino acid sequence of any one of SEQ ID NOs:C2-C45 is located between amino acid positions 587 and 588 of SEQ ID NO:1 (or the appropriate amino acid positions of the alternative sequence). The capsid polypeptide can comprise the amino acid sequence of SEQ ID NO:1 (or an alternative sequence that is the amino acid sequence set forth in SEQ ID NO:2206 or that is an amino acid sequence at least 95%, at least 96%, at least 97%, at least 98%, or at least 99% identical to the amino acid sequence set forth in SEQ ID NO:1) except that the amino acid sequence of any one of SEQ ID NOs:C2-C43 is located between amino acid positions 587 and 588 of SEQ ID NO:1 (or the appropriate amino acid positions of the alternative sequence). The capsid polypeptide can comprise the amino acid sequence of SEQ ID NO:1 (or an alternative sequence that is the amino acid sequence set forth in SEQ ID NO:2206 or that is an amino acid sequence at least 95%, at least 96%, at least 97%, at least 98%, or at least 99% identical to the amino acid sequence set forth in SEQ ID NO:1) except that the amino acids from position 585 to 590 of SEQ ID NO:1 are replaced with the amino acid sequence of any one of SEQ ID NOs:C2-C45. The capsid polypeptide can comprise the amino acid sequence of SEQ ID NO:1 (or an alternative sequence that is the amino acid sequence set forth in SEQ ID NO:2206 or that is an amino acid sequence at least 95%, at least 96%, at least 97%, at least 98%, or at least 99% identical to the amino acid sequence set forth in SEQ ID NO:1) except that the amino acids from position 585 to 590 of SEQ ID NO:1 are replaced with the amino acid sequence of any one of SEQ ID NOs:C44-C45. An AAV vector comprising the polypeptide can infect greater than 2 percent of retinal cells within two or more retinal regions when a titer of at least 1×10⁷ of the vector is administered intravitreally to an eye of a human (or a non-human primate). An AAV vector comprising the polypeptide can express more nucleic acid in retinal cells in at least two retinal regions than the level of expression from a comparable AAV vector comprising a capsid polypeptide consisting of the amino acid sequence set forth in SEQ ID NO:1, wherein the at least two retinal regions are selected from the group consisting of a fovea region, a parafovea region, a vascular arcade region, and a periphery region.

[0053] In another aspect, this document features a nucleic acid molecule encoding an AAV vector comprising an AAV capsid polypeptide, wherein the capsid polypeptide comprises the amino acid sequence of any one of SEQ ID NOs:C2-C45. The capsid polypeptide can comprise the amino acid sequence of SEQ ID NO:1 (or an alternative sequence that is the amino acid sequence set forth in SEQ ID NO:2206 or that is an amino acid sequence at least 95%, at least 96%, at least 97%, at least 98%, or at least 99% identical to the amino acid sequence set forth in SEQ ID NO:1) except that the amino acid sequence of any one of SEQ ID NOs:C2-C45 is located between amino acid positions 587 and 588 of SEQ ID NO:1 (or the appropriate amino acid positions of the alternative sequence). The capsid polypeptide can comprise the amino acid sequence of SEQ ID NO:1 (or an alternative sequence that is the amino acid sequence set forth in SEQ ID NO:2206 or that is an amino acid sequence at least 95%, at least 96%, at least 97%, at least 98%, or at least 99% identical to the amino acid sequence set forth in SEQ ID NO:1) except that the amino acid sequence of any one of SEQ ID NOs:C2-C43 is located between amino acid positions 587 and 588 of SEQ ID NO:1 (or the appropriate amino acid positions of the alternative sequence). The capsid polypeptide can comprise the amino acid sequence of SEQ ID NO:1 (or an alternative sequence that is the amino acid sequence set forth in SEQ ID NO:2206 or that is an amino acid sequence at least 95%, at least 96%, at least 97%, at least 98%, or at least 99% identical to the amino acid sequence set forth in SEQ ID NO:1) except that the amino acids from position 585 to 590 of SEQ ID NO:1 are replaced with the amino acid sequence of any one of SEQ ID NOs:C2-C45. The capsid polypeptide can comprise the amino acid sequence of SEQ ID NO:1 (or an alternative sequence that is the amino acid sequence set forth in SEQ ID NO:2206 or that is an amino acid sequence at least 95%, at least 96%, at least 97%, at least 98%, or at least 99% identical to the amino acid sequence set forth in SEQ ID NO:1) except that the amino acids from position 585 to 590 of SEQ ID NO:1 are replaced with the amino acid sequence of any one of SEQ ID NOs:C44-C45. The vector can be an AAV2 vector. The vector can infect greater than 2 percent of retinal cells within two or more retinal regions when a titer of at least 1×10⁷ of the vector is administered intravitreally to an eye of a human (or a non-human primate). The vector can comprise an exogenous nucleic acid encoding an RNA or a polypeptide. The exogenous nucleic acid can encode an RNA. The RNA can be an siRNA or microRNA. The exogenous nucleic acid can encode a polypeptide. The polypeptide can be an ABCA4 polypeptide, a CRB1 polypeptide, an NPHP5 polypeptide, or an NR2E3 polypeptide. The vector can express more nucleic acid in retinal cells in at least two retinal regions than the level of expression from a comparable AAV vector comprising a capsid polypeptide consisting of the amino acid sequence set forth in SEQ ID NO:1, wherein the at least two retinal regions are selected from the group consisting of a fovea region, a parafovea region, a vascular arcade region, and a periphery region. The nucleic acid molecule can be DNA.

[0054] In another aspect, this document features a nucleic acid molecule encoding an AAV capsid polypeptide comprising the amino acid sequence of any one of SEQ ID NOs:C2-C45.

[0055] The capsid polypeptide can comprise the amino acid sequence of SEQ ID NO:1 (or an alternative sequence that is the amino acid sequence set forth in SEQ ID NO:2206 or that is an amino acid sequence at least 95%, at least 96%, at least 97%, at least 98%, or at least 99% identical to the amino acid sequence set forth in SEQ ID NO:1) except that the amino acid sequence of any one of SEQ ID NOs:C2-C45 is located between amino acid positions 587 and 588 of SEQ ID NO:1 (or the appropriate amino acid positions of the alternative sequence). The capsid polypeptide can comprise the amino acid sequence of SEQ ID NO:1 (or an alternative sequence that is the amino acid sequence set forth in SEQ ID NO:2206 or that is an amino acid sequence at least 95%, at least 96%, at least 97%, at least 98%, or at least 99% identical to the amino acid sequence set forth in SEQ ID NO:1) except that the amino acid sequence of any one of SEQ ID NOs:C2-C43 is located between amino acid positions 587 and 588 of SEQ ID NO:1 (or the appropriate amino acid positions of the alternative sequence). The capsid polypeptide can comprise the amino acid sequence of SEQ ID NO:1 (or an alternative sequence that is the amino acid sequence set forth in SEQ ID NO:2206 or that is an amino acid sequence at least 95%, at least 96%, at least 97%, at least 98%, or at least 99% identical to the amino acid sequence set forth in SEQ ID NO:1) except that the amino acids from position 585 to 590 of SEQ ID NO: 1 are replaced with the amino acid sequence of any one of SEQ ID NOs:C2-C45. The capsid polypeptide can comprise the amino acid sequence of SEQ ID NO:1 (or an alternative sequence that is the amino acid sequence set forth in SEQ ID NO:2206 or that is an amino acid sequence at least 95%, at least 96%, at least 97%, at least 98%, or at least 99% identical to the amino acid sequence set forth in SEQ ID NO:1) except that the amino acids from position 585 to 590 of SEQ ID NO:1 are replaced with the amino acid sequence of any one of SEQ ID NOs:C44-C45. An AAV vector comprising the polypeptide can infect greater than 2 percent of retinal cells within two or more retinal regions when a titer of at least 1×10⁷ of the vector is administered intravitreally to an eye of a human (or a non-human primate). An AAV vector comprising the polypeptide can express more nucleic acid in retinal cells in at least two retinal regions than the level of expression from a comparable AAV vector comprising a capsid polypeptide consisting of the amino acid sequence set forth in SEQ ID NO:1, wherein the at least two retinal regions are selected from the group consisting of a fovea region, a parafovea region, a vascular arcade region, and a periphery region. The nucleic acid molecule can be DNA.

[0056] In another aspect, this document features a host cell comprising a nucleic acid molecule of either of the two preceding paragraphs. The host cell can express the vector. The host cell can express the polypeptide.

[0057] In another aspect, this document features a host cell comprising an AAV vector comprising an AAV capsid polypeptide, wherein the capsid polypeptide comprises the amino acid sequence of any one of SEQ ID NOs:C2-C45. The capsid polypeptide can comprise the amino acid sequence of SEQ ID NO:1 (or an alternative sequence that is the amino acid sequence set forth in SEQ ID NO:2206 or that is an amino acid sequence at least 95%, at least 96%, at least 97%, at least 98%, or at least 99% identical to the amino acid sequence set forth in SEQ ID NO:1) except that the amino acid sequence of any one of SEQ ID NOs:C2-C45 is located between amino acid positions 587 and 588 of SEQ ID NO:1 (or the appropriate amino acid positions of the alternative sequence). The capsid polypeptide can comprise the amino acid sequence of SEQ ID NO:1 (or an alternative sequence that is the amino acid sequence set forth in SEQ ID NO:2206 or that is an amino acid sequence at least 95%, at least 96%, at least 97%, at least 98%, or at least 99% identical to the amino acid sequence set forth in SEQ ID NO:1) except that the amino acid sequence of any one of SEQ ID NOs:C2-C43 is located between amino acid positions 587 and 588 of SEQ ID NO:1 (or the appropriate amino acid positions of the alternative sequence). The capsid polypeptide can comprise the amino acid sequence of SEQ ID NO:1 (or an alternative sequence that is the amino acid sequence set forth in SEQ ID NO:2206 or that is an amino acid sequence at least 95%, at least 96%, at least 97%, at least 98%, or at least 99% identical to the amino acid sequence set forth in SEQ ID NO:1) except that the amino acids from position 585 to 590 of SEQ ID NO:1 are replaced with the amino acid sequence of any one of SEQ ID NOs:C2-C45. The capsid polypeptide can comprise the amino acid sequence of SEQ ID NO:1 (or an alternative sequence that is the amino acid sequence set forth in SEQ ID NO:2206 or that is an amino acid sequence at least 95%, at least 96%, at least 97%, at least 98%, or at least 99% identical to the amino acid sequence set forth in SEQ ID NO:1) except that the amino acids from position 585 to 590 of SEQ ID NO:1 are replaced with the amino acid sequence of any one of SEQ ID NOs:C44-C45. The vector can be an AAV2 vector. The vector can infect greater than 2 percent of retinal cells within two or more retinal regions when a titer of at least 1×10⁷ of the vector is administered intravitreally to an eye of a human (or a non-human primate). The vector can comprise an exogenous nucleic acid encoding an RNA or a polypeptide. The exogenous nucleic acid can encode an RNA. The RNA can be an siRNA or microRNA. The exogenous nucleic acid can encode a polypeptide. The polypeptide can be an ABCA4 polypeptide, a CRB1 polypeptide, an NPHP5 polypeptide, or an NR2E3 polypeptide. The vector can express more nucleic acid in retinal cells in at least two retinal regions than the level of expression from a comparable AAV vector comprising a capsid polypeptide consisting of the amino acid sequence set forth in SEQ ID NO:1, wherein the at least two retinal regions are selected from the group consisting of a fovea region, a parafovea region, a vascular arcade region, and a periphery region. The host cell can be a retinal cell.

[0058] In another aspect, this document features a host cell comprising an AAV capsid polypeptide comprising the amino acid sequence of any one of SEQ ID NOs:C2-C45. The capsid polypeptide can comprise the amino acid sequence of SEQ ID NO:1 (or an alternative sequence that is the amino acid sequence set forth in SEQ ID NO:2206 or that is an amino acid sequence at least 95%, at least 96%, at least 97%, at least 98%, or at least 99% identical to the amino acid sequence set forth in SEQ ID NO:1) except that the amino acid sequence of any one of SEQ ID NOs:C2-C45 is located between amino acid positions 587 and 588 of SEQ ID NO:1 (or the appropriate amino acid positions of the alternative sequence). The capsid polypeptide can comprise the amino acid sequence of SEQ ID NO:1 (or an alternative sequence that is the amino acid sequence set forth in SEQ ID NO:2206 or that is an amino acid sequence at least 95%, at least 96%, at least 97%, at least 98%, or at least 99% identical to the amino acid sequence set forth in SEQ ID NO:1) except that the amino acid sequence of any one of SEQ ID NOs:C2-C43 is located between amino acid positions 587 and 588 of SEQ ID NO:1 (or the appropriate amino acid positions of the alternative sequence). The capsid polypeptide can comprise the amino acid sequence of SEQ ID NO:1 (or an alternative sequence that is the amino acid sequence set forth in SEQ ID NO:2206 or that is an amino acid sequence at least 95%, at least 96%, at least 97%, at least 98%, or at least 99% identical to the amino acid sequence set forth in SEQ ID NO:1) except that the amino acids from position 585 to 590 of SEQ ID NO:1 are replaced with the amino acid sequence of any one of SEQ ID NOs:C2-C45. The capsid polypeptide can comprise the amino acid sequence of SEQ ID NO:1 (or an alternative sequence that is the amino acid sequence set forth in SEQ ID NO:2206 or that is an amino acid sequence at least 95%, at least 96%, at least 97%, at least 98%, or at least 99% identical to the amino acid sequence set forth in SEQ ID NO:1) except that the amino acids from position 585 to 590 of SEQ ID NO:1 are replaced with the amino acid sequence of any one of SEQ ID NOs:C44-C45. An AAV vector comprising the polypeptide can infect greater than 2 percent of retinal cells within two or more retinal regions when a titer of at least 1×10⁷ of the vector is administered intravitreally to an eye of a human (or a non-human primate). An AAV vector comprising the polypeptide can express more nucleic acid in retinal cells in at least two retinal regions than the level of expression from a comparable AAV vector comprising a capsid polypeptide consisting of the amino acid sequence set forth in SEQ ID NO:1, wherein the at least two retinal regions are selected from the group consisting of a fovea region, a parafovea region, a vascular arcade region, and a periphery region. The host cell can be a retinal cell.

[0059] In another aspect, this document features a composition comprising an AAV vector comprising an AAV capsid polypeptide, wherein the capsid polypeptide comprises the amino acid sequence of any one of SEQ ID NOs:C2-C45. The capsid polypeptide can comprise the amino acid sequence of SEQ ID NO:1 (or an alternative sequence that is the amino acid sequence set forth in SEQ ID NO:2206 or that is an amino acid sequence at least 95%, at least 96%, at least 97%, at least 98%, or at least 99% identical to the amino acid sequence set forth in SEQ ID NO:1) except that the amino acid sequence of any one of SEQ ID NOs:C2-C45 is located between amino acid positions 587 and 588 of SEQ ID NO:1 (or the appropriate amino acid positions of the alternative sequence). The capsid polypeptide can comprise the amino acid sequence of SEQ ID NO:1 (or an alternative sequence that is the amino acid sequence set forth in SEQ ID NO:2206 or that is an amino acid sequence at least 95%, at least 96%, at least 97%, at least 98%, or at least 99% identical to the amino acid sequence set forth in SEQ ID NO:1) except that the amino acid sequence of any one of SEQ ID NOs:C2-C43 is located between amino acid positions 587 and 588 of SEQ ID NO:1 (or the appropriate amino acid positions of the alternative sequence). The capsid polypeptide can comprise the amino acid sequence of SEQ ID NO:1 (or an alternative sequence that is the amino acid sequence set forth in SEQ ID NO:2206 or that is an amino acid sequence at least 95%, at least 96%, at least 97%, at least 98%, or at least 99% identical to the amino acid sequence set forth in SEQ ID NO:1) except that the amino acids from position 585 to 590 of SEQ ID NO:1 are replaced with the amino acid sequence of any one of SEQ ID NOs:C2-C45. The capsid polypeptide can comprise the amino acid sequence of SEQ ID NO:1 (or an alternative sequence that is the amino acid sequence set forth in SEQ ID NO:2206 or that is an amino acid sequence at least 95%, at least 96%, at least 97%, at least 98%, or at least 99% identical to the amino acid sequence set forth in SEQ ID NO:1) except that the amino acids from position 585 to 590 of SEQ ID NO:1 are replaced with the amino acid sequence of any one of SEQ ID NOs:C44-C45. The vector can be an AAV2 vector. The vector can infect greater than 2 percent of retinal cells within two or more retinal regions when a titer of at least 1×10⁷ of the vector is administered intravitreally to an eye of a human (or a non-human primate). The vector can comprise an exogenous nucleic acid encoding an RNA or a polypeptide. The exogenous nucleic acid can encode an RNA. The RNA can be an siRNA or microRNA. The exogenous nucleic acid can encode a polypeptide. The polypeptide can be an ABCA4 polypeptide, a CRB1 polypeptide, an NPHP5 polypeptide, or an NR2E3 polypeptide. The vector can express more nucleic acid in retinal cells in at least two retinal regions than the level of expression from a comparable AAV vector comprising a capsid polypeptide consisting of the amino acid sequence set forth in SEQ ID NO:1, wherein the at least two retinal regions are selected from the group consisting of a fovea region, a parafovea region, a vascular arcade region, and a periphery region. The composition can comprise from about 1×10⁷ to about 1×10¹⁴ of the vector. The composition can comprise phosphate buffered saline, Hank's Balanced Salt Solution, or Pluronic F68.

[0060] In another aspect, this document features a method for delivering an exogenous nucleic acid sequence to retinal cells within at least two different retinal regions of an eye of a mammal. The method comprises (or consists essentially of, or consists of) contacting the retinal cells with an AAV vector comprising an AAV capsid polypeptide and the exogenous nucleic acid sequence, wherein the capsid polypeptide comprises the amino acid sequence of any one of SEQ ID NOs:C2-C45, wherein the AAV vector infects retinal cells within the at least two different retinal regions, thereby delivering the exogenous nucleic acid sequence to the retinal cells, wherein the at least two retinal regions are selected from the group consisting of a fovea region, a parafovea region, a vascular arcade region, and a periphery region. The capsid polypeptide can comprise the amino acid sequence of SEQ ID NO:1 (or an alternative sequence that is the amino acid sequence set forth in SEQ ID NO:2206 or that is an amino acid sequence at least 95%, at least 96%, at least 97%, at least 98%, or at least 99% identical to the amino acid sequence set forth in SEQ ID NO:1) except that the amino acid sequence of any one of SEQ ID NOs:C2-C45 is located between amino acid positions 587 and 588 of SEQ ID NO:1 (or the appropriate amino acid positions of the alternative sequence). The capsid polypeptide can comprise the amino acid sequence of SEQ ID NO:1 (or an alternative sequence that is the amino acid sequence set forth in SEQ ID NO:2206 or that is an amino acid sequence at least 95%, at least 96%, at least 97%, at least 98%, or at least 99% identical to the amino acid sequence set forth in SEQ ID NO:1) except that the amino acid sequence of any one of SEQ ID NOs:C2-C43 is located between amino acid positions 587 and 588 of SEQ ID NO:1 (or the appropriate amino acid positions of the alternative sequence). The capsid polypeptide can comprise the amino acid sequence of SEQ ID NO:1 (or an alternative sequence that is the amino acid sequence set forth in SEQ ID NO:2206 or that is an amino acid sequence at least 95%, at least 96%, at least 97%, at least 98%, or at least 99% identical to the amino acid sequence set forth in SEQ ID NO:1) except that the amino acids from position 585 to 590 of SEQ ID NO:1 are replaced with the amino acid sequence of any one of SEQ ID NOs:C2-C45. The capsid polypeptide can comprise the amino acid sequence of SEQ ID NO:1 (or an alternative sequence that is the amino acid sequence set forth in SEQ ID NO:2206 or that is an amino acid sequence at least 95%, at least 96%, at least 97%, at least 98%, or at least 99% identical to the amino acid sequence set forth in SEQ ID NO:1) except that the amino acids from position 585 to 590 of SEQ ID NO:1 are replaced with the amino acid sequence of any one of SEQ ID NOs:C44-C45. The mammal can be a human (or a non-human primate). The vector can be an AAV2 vector. The vector can infect greater than 2 percent of retinal cells within the at least two retinal regions when a titer of at least 1×10⁷ of the vector is administered intravitreally to an eye of a human (or a non-human primate). The exogenous nucleic acid sequence can encode an RNA or a polypeptide. The exogenous nucleic acid can encode an RNA. The RNA can be an siRNA or microRNA. The exogenous nucleic acid can encode a polypeptide. The polypeptide can be an ABCA4 polypeptide, a CRB1 polypeptide, an NPHP5 polypeptide, or an NR2E3 polypeptide. The vector can express more of the exogenous nucleic acid sequence in the retinal cells of the at least two retinal regions than the level of expression in a retinal cell from a comparable AAV vector comprising a capsid polypeptide consisting of the amino acid sequence set forth in SEQ ID NO:1. The method can comprise intravitreally administering a composition comprising the vector to the mammal, thereby contacting the retinal cells with the vector. The composition can comprise from about 1×10⁷ to about 1×10¹⁴ of the vector.

[0061] In another aspect, this document features a method for treating a retinal condition. The method comprises (or consists essentially of, or consists of) contacting retinal cells of at least two retinal regions of an eye of a mammal having the retinal condition with AAV vectors comprising an AAV capsid polypeptide and an exogenous nucleic acid sequence, wherein the capsid polypeptide comprises the amino acid sequence of any one of SEQ ID NOs:C2-C45, wherein the AAV vectors infect the retinal cells of the at least two retinal regions and drive expression of the exogenous nucleic acid sequence within the retinal cells of the at least two retinal regions, thereby treating the retinal condition. The mammal can be a human (or a non-human primate). The retinal condition can be selected from the group consisting of LCA, OCA1, retinitis pigmentosa, rod/cone dystrophy, cone dystrophy, Stargardt Disease, Usher syndrome, XLRP, and XLRS. The capsid polypeptide can comprise the amino acid sequence of SEQ ID NO:1 (or an alternative sequence that is the amino acid sequence set forth in SEQ ID NO:2206 or that is an amino acid sequence at least 95%, at least 96%, at least 97%, at least 98%, or at least 99% identical to the amino acid sequence set forth in SEQ ID NO:1) except that the amino acid sequence of any one of SEQ ID NOs:C2-C45 is located between amino acid positions 587 and 588 of SEQ ID NO:1 (or the appropriate amino acid positions of the alternative sequence). The capsid polypeptide can comprise the amino acid sequence of SEQ ID NO:1 (or an alternative sequence that is the amino acid sequence set forth in SEQ ID NO:2206 or that is an amino acid sequence at least 95%, at least 96%, at least 97%, at least 98%, or at least 99% identical to the amino acid sequence set forth in SEQ ID NO: 1) except that the amino acid sequence of any one of SEQ ID NOs:C2-C43 is located between amino acid positions 587 and 588 of SEQ ID NO:1 (or the appropriate amino acid positions of the alternative sequence). The capsid polypeptide can comprise the amino acid sequence of SEQ ID NO:1 (or an alternative sequence that is the amino acid sequence set forth in SEQ ID NO:2206 or that is an amino acid sequence at least 95%, at least 96%, at least 97%, at least 98%, or at least 99% identical to the amino acid sequence set forth in SEQ ID NO:1) except that the amino acids from position 585 to 590 of SEQ ID NO:1 are replaced with the amino acid sequence of any one of SEQ ID NOs:C2-C45. The capsid polypeptide can comprise the amino acid sequence of SEQ ID NO:1 (or an alternative sequence that is the amino acid sequence set forth in SEQ ID NO:2206 or that is an amino acid sequence at least 95%, at least 96%, at least 97%, at least 98%, or at least 99% identical to the amino acid sequence set forth in SEQ ID NO: 1) except that the amino acids from position 585 to 590 of SEQ ID NO:1 are replaced with the amino acid sequence of any one of SEQ ID NOs:C44-C45. The vectors can be AAV2 vectors. The vectors can infect greater than 2 percent of retinal cells in the at least two retinal regions when a titer of at least 1×10¹⁴ of the vectors is administered intravitreally to an eye of the mammal. The exogenous nucleic acid sequence can encode an RNA. The RNA can be an siRNA or a microRNA. The exogenous nucleic acid can encode a polypeptide. The polypeptide can be an ABCA4 polypeptide, a CRB1 polypeptide, an NPHP5 polypeptide, and an NR2E3 polypeptide. The vectors can express more of the exogenous nucleic acid sequence in the retinal cells of the at least two retinal regions than the level of expression in retinal cells of the at least two retinal regions from a comparable AAV vector comprising a capsid polypeptide consisting of the amino acid sequence set forth in SEQ ID NO:1. The method can comprise intravitreally administering a composition comprising the vectors to the mammal, thereby contacting the retinal cells of the at least two retinal regions with the vectors. The composition can comprise from about 1×10⁷ to about 1×10¹⁴ of the vectors. The at least two retinal regions can be selected from the group consisting of a fovea region, a parafovea region, a vascular arcade region, and a periphery region.

[0062] In another aspect, this document features an adeno-associated virus (AAV) vector comprising an AAV capsid polypeptide, wherein the capsid polypeptide comprises the amino acid sequence of any one of SEQ ID NOs:D2-D78. The capsid polypeptide can comprise the amino acid sequence of SEQ ID NO:1 (or an alternative sequence that is the amino acid sequence set forth in SEQ ID NO:2206 or that is an amino acid sequence at least 95%, at least 96%, at least 97%, at least 98%, or at least 99% identical to the amino acid sequence set forth in SEQ ID NO:1) except that the amino acid sequence of any one of SEQ ID NOs:D2-D78 is located between amino acid positions 587 and 588 of SEQ ID NO:1 (or the appropriate amino acid positions of the alternative sequence). The capsid polypeptide can comprise the amino acid sequence of SEQ ID NO:1 (or an alternative sequence that is the amino acid sequence set forth in SEQ ID NO:2206 or that is an amino acid sequence at least 95%, at least 96%, at least 97%, at least 98%, or at least 99% identical to the amino acid sequence set forth in SEQ ID NO:1) except that the amino acid sequence of any one of SEQ ID NOs:D2-D76 is located between amino acid positions 587 and 588 of SEQ ID NO:1 (or the appropriate amino acid positions of the alternative sequence). The capsid polypeptide can comprise the amino acid sequence of SEQ ID NO:1 (or an alternative sequence that is the amino acid sequence set forth in SEQ ID NO:2206 or that is an amino acid sequence at least 95%, at least 96%, at least 97%, at least 98%, or at least 99% identical to the amino acid sequence set forth in SEQ ID NO:1) except that the amino acids from position 585 to 590 of SEQ ID NO:1 are replaced with the amino acid sequence of any one of SEQ ID NOs:D2-D78. The capsid polypeptide can comprise the amino acid sequence of SEQ ID NO:1 (or an alternative sequence that is the amino acid sequence set forth in SEQ ID NO:2206 or that is an amino acid sequence at least 95%, at least 96%, at least 97%, at least 98%, or at least 99% identical to the amino acid sequence set forth in SEQ ID NO:1) except that the amino acids from position 585 to 590 of SEQ ID NO:1 are replaced with the amino acid sequence of any one of SEQ ID NOs:D77-D78. The vector can be an AAV2 vector. The vector can infect greater than 2 percent of retinal cells of a parafovea region of an eye when a titer of at least 1×10⁷ of the vector is administered intravitreally to an eye of a human (or a non-human primate). The vector can comprise an exogenous nucleic acid encoding an RNA or a polypeptide. The exogenous nucleic acid can encode an RNA. The RNA can be an siRNA or microRNA. The exogenous nucleic acid can encode a polypeptide. The polypeptide can be an ABCA4 polypeptide, a CRB1 polypeptide, an NPHP5 polypeptide, or an NR2E3 polypeptide. The vector can express more nucleic acid in retinal cells of a parafovea region of an eye than the level of expression from a comparable AAV vector comprising a capsid polypeptide consisting of the amino acid sequence set forth in SEQ ID NO:1.

[0063] In another aspect, this document features an AAV capsid polypeptide comprising the amino acid sequence of any one of SEQ ID NOs:D2-D78. The polypeptide can comprise the amino acid sequence of SEQ ID NO:1 (or an alternative sequence that is the amino acid sequence set forth in SEQ ID NO:2206 or that is an amino acid sequence at least 95%, at least 96%, at least 97%, at least 98%, or at least 99% identical to the amino acid sequence set forth in SEQ ID NO:1) except that the amino acid sequence of any one of SEQ ID NOs:D2-D78 is located between amino acid positions 587 and 588 of SEQ ID NO:1 (or the appropriate amino acid positions of the alternative sequence). The polypeptide can comprise the amino acid sequence of SEQ ID NO:1 (or an alternative sequence that is the amino acid sequence set forth in SEQ ID NO:2206 or that is an amino acid sequence at least 95%, at least 96%, at least 97%, at least 98%, or at least 99% identical to the amino acid sequence set forth in SEQ ID NO:1) except that the amino acid sequence of any one of SEQ ID NOs:D2-D76 is located between amino acid positions 587 and 588 of SEQ ID NO:1 (or the appropriate amino acid positions of the alternative sequence). The polypeptide can comprise the amino acid sequence of SEQ ID NO:1 (or an alternative sequence that is the amino acid sequence set forth in SEQ ID NO:2206 or that is an amino acid sequence at least 95%, at least 96%, at least 97%, at least 98%, or at least 99% identical to the amino acid sequence set forth in SEQ ID NO: 1) except that the amino acids from position 585 to 590 of SEQ ID NO:1 are replaced with the amino acid sequence of any one of SEQ ID NOs:D2-D78. The polypeptide can comprise the amino acid sequence of SEQ ID NO:1 (or an alternative sequence that is the amino acid sequence set forth in SEQ ID NO:2206 or that is an amino acid sequence at least 95%, at least 96%, at least 97%, at least 98%, or at least 99% identical to the amino acid sequence set forth in SEQ ID NO: 1) except that the amino acids from position 585 to 590 of SEQ ID NO:1 are replaced with the amino acid sequence of any one of SEQ ID NOs:D77-D78. An AAV vector comprising the polypeptide can infect greater than 2 percent of retinal cells of a parafovea region of an eye when a titer of at least 1×10⁷ of the vector is administered intravitreally to an eye of a human (or a non-human primate). An AAV vector comprising the polypeptide can express more nucleic acid in retinal cells of a parafovea region of an eye than the level of expression from a comparable AAV vector comprising a capsid polypeptide consisting of the amino acid sequence set forth in SEQ ID NO:1.

[0064] In another aspect, this document features a nucleic acid molecule encoding an AAV vector comprising an AAV capsid polypeptide, wherein the capsid polypeptide comprises the amino acid sequence of any one of SEQ ID NOs:D2-D78. The capsid polypeptide can comprise the amino acid sequence of SEQ ID NO:1 (or an alternative sequence that is the amino acid sequence set forth in SEQ ID NO:2206 or that is an amino acid sequence at least 95%, at least 96%, at least 97%, at least 98%, or at least 99% identical to the amino acid sequence set forth in SEQ ID NO:1) except that the amino acid sequence of any one of SEQ ID NOs:D2-D78 is located between amino acid positions 587 and 588 of SEQ ID NO:1 (or the appropriate amino acid positions of the alternative sequence). The capsid polypeptide can comprise the amino acid sequence of SEQ ID NO:1 (or an alternative sequence that is the amino acid sequence set forth in SEQ ID NO:2206 or that is an amino acid sequence at least 95%, at least 96%, at least 97%, at least 98%, or at least 99% identical to the amino acid sequence set forth in SEQ ID NO:1) except that the amino acid sequence of any one of SEQ ID NOs:D2-D76 is located between amino acid positions 587 and 588 of SEQ ID NO:1 (or the appropriate amino acid positions of the alternative sequence). The capsid polypeptide can comprise the amino acid sequence of SEQ ID NO:1 (or an alternative sequence that is the amino acid sequence set forth in SEQ ID NO:2206 or that is an amino acid sequence at least 95%, at least 96%, at least 97%, at least 98%, or at least 99% identical to the amino acid sequence set forth in SEQ ID NO:1) except that the amino acids from position 585 to 590 of SEQ ID NO:1 are replaced with the amino acid sequence of any one of SEQ ID NOs:D2-D78. The capsid polypeptide can comprise the amino acid sequence of SEQ ID NO:1 (or an alternative sequence that is the amino acid sequence set forth in SEQ ID NO:2206 or that is an amino acid sequence at least 95%, at least 96%, at least 97%, at least 98%, or at least 99% identical to the amino acid sequence set forth in SEQ ID NO:1) except that the amino acids from position 585 to 590 of SEQ ID NO:1 are replaced with the amino acid sequence of any one of SEQ ID NOs:D77-D78. The vector can be an AAV2 vector. The vector can infect greater than 2 percent of retinal cells of a parafovea region of an eye when a titer of at least 1×10⁷ of the vector is administered intravitreally to an eye of a human (or a non-human primate). The vector can comprise an exogenous nucleic acid encoding an RNA or a polypeptide. The exogenous nucleic acid can encode an RNA. The RNA can be an siRNA or microRNA. The exogenous nucleic acid can encode a polypeptide. The polypeptide can be an ABCA4 polypeptide, a CRB1 polypeptide, an NPHP5 polypeptide, or an NR2E3 polypeptide. The vector can express more nucleic acid in retinal cells of a parafovea region of an eye than the level of expression from a comparable AAV vector comprising a capsid polypeptide consisting of the amino acid sequence set forth in SEQ ID NO:1. The nucleic acid molecule can be DNA.

[0065] In another aspect, this document features a nucleic acid molecule encoding an AAV capsid polypeptide comprising the amino acid sequence of any one of SEQ ID NOs:D2-D78. The polypeptide can comprise the amino acid sequence of SEQ ID NO:1 (or an alternative sequence that is the amino acid sequence set forth in SEQ ID NO:2206 or that is an amino acid sequence at least 95%, at least 96%, at least 97%, at least 98%, or at least 99% identical to the amino acid sequence set forth in SEQ ID NO:1) except that the amino acid sequence of any one of SEQ ID NOs:D2-D78 is located between amino acid positions 587 and 588 of SEQ ID NO:1 (or the appropriate amino acid positions of the alternative sequence). The polypeptide can comprise the amino acid sequence of SEQ ID NO:1 (or an alternative sequence that is the amino acid sequence set forth in SEQ ID NO:2206 or that is an amino acid sequence at least 95%, at least 96%, at least 97%, at least 98%, or at least 99% identical to the amino acid sequence set forth in SEQ ID NO:1) except that the amino acid sequence of any one of SEQ ID NOs:D2-D76 is located between amino acid positions 587 and 588 of SEQ ID NO:1 (or the appropriate amino acid positions of the alternative sequence). The polypeptide can comprise the amino acid sequence of SEQ ID NO:1 (or an alternative sequence that is the amino acid sequence set forth in SEQ ID NO:2206 or that is an amino acid sequence at least 95%, at least 96%, at least 97%, at least 98%, or at least 99% identical to the amino acid sequence set forth in SEQ ID NO:1) except that the amino acids from position 585 to 590 of SEQ ID NO:1 are replaced with the amino acid sequence of any one of SEQ ID NOs:D2-D78. The polypeptide can comprise the amino acid sequence of SEQ ID NO:1 (or an alternative sequence that is the amino acid sequence set forth in SEQ ID NO:2206 or that is an amino acid sequence at least 95%, at least 96%, at least 97%, at least 98%, or at least 99% identical to the amino acid sequence set forth in SEQ ID NO:1) except that the amino acids from position 585 to 590 of SEQ ID NO:1 are replaced with the amino acid sequence of any one of SEQ ID NOs:D77-D78. An AAV vector comprising the polypeptide can infect greater than 2 percent of retinal cells of a parafovea region of an eye when a titer of at least 1×10⁷ of the vector is administered intravitreally to an eye of a human (or a non-human primate). An AAV vector comprising the polypeptide can express more nucleic acid in retinal cells of a parafovea region of an eye than the level of expression from a comparable AAV vector comprising a capsid polypeptide consisting of the amino acid sequence set forth in SEQ ID NO:1. The nucleic acid molecule can be DNA.

[0066] In another aspect, this document features a host cell comprising a nucleic acid molecule of either of the two preceding paragraphs. The host cell can express the vector. The host cell can express the polypeptide.

[0067] In another aspect, this document features a host cell comprising an AAV vector comprising an AAV capsid polypeptide, wherein the capsid polypeptide comprises the amino acid sequence of any one of SEQ ID NOs:D2-D78. The capsid polypeptide can comprise the amino acid sequence of SEQ ID NO:1 (or an alternative sequence that is the amino acid sequence set forth in SEQ ID NO:2206 or that is an amino acid sequence at least 95%, at least 96%, at least 97%, at least 98%, or at least 99% identical to the amino acid sequence set forth in SEQ ID NO:1) except that the amino acid sequence of any one of SEQ ID NOs:D2-D78 is located between amino acid positions 587 and 588 of SEQ ID NO:1 (or the appropriate amino acid positions of the alternative sequence). The capsid polypeptide can comprise the amino acid sequence of SEQ ID NO:1 (or an alternative sequence that is the amino acid sequence set forth in SEQ ID NO:2206 or that is an amino acid sequence at least 95%, at least 96%, at least 97%, at least 98%, or at least 99% identical to the amino acid sequence set forth in SEQ ID NO:1) except that the amino acid sequence of any one of SEQ ID NOs:D2-D76 is located between amino acid positions 587 and 588 of SEQ ID NO:1 (or the appropriate amino acid positions of the alternative sequence). The capsid polypeptide can comprise the amino acid sequence of SEQ ID NO:1 (or an alternative sequence that is the amino acid sequence set forth in SEQ ID NO:2206 or that is an amino acid sequence at least 95%, at least 96%, at least 97%, at least 98%, or at least 99% identical to the amino acid sequence set forth in SEQ ID NO:1) except that the amino acids from position 585 to 590 of SEQ ID NO:1 are replaced with the amino acid sequence of any one of SEQ ID NOs:D2-D78. The capsid polypeptide can comprise the amino acid sequence of SEQ ID NO:1 (or an alternative sequence that is the amino acid sequence set forth in SEQ ID NO:2206 or that is an amino acid sequence at least 95%, at least 96%, at least 97%, at least 98%, or at least 99% identical to the amino acid sequence set forth in SEQ ID NO:1) except that the amino acids from position 585 to 590 of SEQ ID NO:1 are replaced with the amino acid sequence of any one of SEQ ID NOs:D77-D78. The vector can be an AAV2 vector. The vector can infect greater than 2 percent of retinal cells of a parafovea region of an eye when a titer of at least 1×10⁷ of the vector is administered intravitreally to an eye of a human (or a non-human primate). The vector can comprise an exogenous nucleic acid encoding an RNA or a polypeptide. The exogenous nucleic acid can encode an RNA. The RNA can be an siRNA or microRNA. The exogenous nucleic acid can encode a polypeptide. The polypeptide can be an ABCA4 polypeptide, a CRB1 polypeptide, an NPHP5 polypeptide, or an NR2E3 polypeptide. The vector can express more nucleic acid in retinal cells of a parafovea region of an eye than the level of expression from a comparable AAV vector comprising a capsid polypeptide consisting of the amino acid sequence set forth in SEQ ID NO:1. The host cell can be a retinal cell.

[0068] In another aspect, this document features a host cell comprising an AAV capsid polypeptide comprising the amino acid sequence of any one of SEQ ID NOs:D2-D78. The polypeptide can comprise the amino acid sequence of SEQ ID NO:1 (or an alternative sequence that is the amino acid sequence set forth in SEQ ID NO:2206 or that is an amino acid sequence at least 95%, at least 96%, at least 97%, at least 98%, or at least 99% identical to the amino acid sequence set forth in SEQ ID NO:1) except that the amino acid sequence of any one of SEQ ID NOs:D2-D78 is located between amino acid positions 587 and 588 of SEQ ID NO:1 (or the appropriate amino acid positions of the alternative sequence). The polypeptide can comprise the amino acid sequence of SEQ ID NO:1 (or an alternative sequence that is the amino acid sequence set forth in SEQ ID NO:2206 or that is an amino acid sequence at least 95%, at least 96%, at least 97%, at least 98%, or at least 99% identical to the amino acid sequence set forth in SEQ ID NO:1) except that the amino acid sequence of any one of SEQ ID NOs:D2-D76 is located between amino acid positions 587 and 588 of SEQ ID NO:1 (or the appropriate amino acid positions of the alternative sequence). The polypeptide can comprise the amino acid sequence of SEQ ID NO:1 (or an alternative sequence that is the amino acid sequence set forth in SEQ ID NO:2206 or that is an amino acid sequence at least 95%, at least 96%, at least 97%, at least 98%, or at least 99% identical to the amino acid sequence set forth in SEQ ID NO:1) except that the amino acids from position 585 to 590 of SEQ ID NO:1 are replaced with the amino acid sequence of any one of SEQ ID NOs:D2-D78. The polypeptide can comprise the amino acid sequence of SEQ ID NO:1 (or an alternative sequence that is the amino acid sequence set forth in SEQ ID NO:2206 or that is an amino acid sequence at least 95%, at least 96%, at least 97%, at least 98%, or at least 99% identical to the amino acid sequence set forth in SEQ ID NO:1) except that the amino acids from position 585 to 590 of SEQ ID NO:1 are replaced with the amino acid sequence of any one of SEQ ID NOs:D77-D78. An AAV vector comprising the polypeptide can infect greater than 2 percent of retinal cells of a parafovea region of an eye when a titer of at least 1×10⁷ of the vector is administered intravitreally to an eye of a human (or a non-human primate). An AAV vector comprising the polypeptide can express more nucleic acid in retinal cells of a parafovea region of an eye than the level of expression from a comparable AAV vector comprising a capsid polypeptide consisting of the amino acid sequence set forth in SEQ ID NO:1. The host cell can be a retinal cell.

[0069] In another aspect, this document features a composition comprising an AAV vector comprising an AAV capsid polypeptide, wherein the capsid polypeptide comprises the amino acid sequence of any one of SEQ ID NOs:D2-D78. The capsid polypeptide can comprise the amino acid sequence of SEQ ID NO:1 (or an alternative sequence that is the amino acid sequence set forth in SEQ ID NO:2206 or that is an amino acid sequence at least 95%, at least 96%, at least 97%, at least 98%, or at least 99% identical to the amino acid sequence set forth in SEQ ID NO:1) except that the amino acid sequence of any one of SEQ ID NOs:D2-D78 is located between amino acid positions 587 and 588 of SEQ ID NO:1 (or the appropriate amino acid positions of the alternative sequence). The capsid polypeptide can comprise the amino acid sequence of SEQ ID NO:1 (or an alternative sequence that is the amino acid sequence set forth in SEQ ID NO:2206 or that is an amino acid sequence at least 95%, at least 96%, at least 97%, at least 98%, or at least 99% identical to the amino acid sequence set forth in SEQ ID NO:1) except that the amino acid sequence of any one of SEQ ID NOs:D2-D76 is located between amino acid positions 587 and 588 of SEQ ID NO:1 (or the appropriate amino acid positions of the alternative sequence). The capsid polypeptide can comprise the amino acid sequence of SEQ ID NO:1 (or an alternative sequence that is the amino acid sequence set forth in SEQ ID NO:2206 or that is an amino acid sequence at least 95%, at least 96%, at least 97%, at least 98%, or at least 99% identical to the amino acid sequence set forth in SEQ ID NO:1) except that the amino acids from position 585 to 590 of SEQ ID NO:1 are replaced with the amino acid sequence of any one of SEQ ID NOs:D2-D78. The capsid polypeptide can comprise the amino acid sequence of SEQ ID NO:1 (or an alternative sequence that is the amino acid sequence set forth in SEQ ID NO:2206 or that is an amino acid sequence at least 95%, at least 96%, at least 97%, at least 98%, or at least 99% identical to the amino acid sequence set forth in SEQ ID NO:1) except that the amino acids from position 585 to 590 of SEQ ID NO:1 are replaced with the amino acid sequence of any one of SEQ ID NOs:D77-D78. The vector can be an AAV2 vector. The vector can infect greater than 2 percent of retinal cells of a parafovea region of an eye when a titer of at least 1×10⁷ of the vector is administered intravitreally to an eye of a human (or a non-human primate). The vector can comprise an exogenous nucleic acid encoding an RNA or a polypeptide. The exogenous nucleic acid can encode an RNA. The RNA can be an siRNA or microRNA. The exogenous nucleic acid can encode a polypeptide. The polypeptide can be an ABCA4 polypeptide, a CRB1 polypeptide, an NPHP5 polypeptide, or an NR2E3 polypeptide. The vector can express more nucleic acid in retinal cells of a parafovea region of an eye than the level of expression from a comparable AAV vector comprising a capsid polypeptide consisting of the amino acid sequence set forth in SEQ ID NO:1. The composition can comprise from about 1×10⁷ to about 1×10¹⁴ of the vector. The composition can comprise phosphate buffered saline, Hank's Balanced Salt Solution, or Pluronic F68.

[0070] In another aspect, this document features a method for delivering an exogenous nucleic acid sequence to retinal cells of a parafovea region of an eye within a mammal. The method comprises (or consists essentially of, or consists of) contacting the retinal cells with an AAV vector comprising an AAV capsid polypeptide and the exogenous nucleic acid sequence, wherein the capsid polypeptide comprises the amino acid sequence of any one of SEQ ID NOs:D2-D78, wherein the AAV vector infects the retinal cells, thereby delivering the exogenous nucleic acid sequence to the retinal cells. The capsid polypeptide can comprise the amino acid sequence of SEQ ID NO:1 (or an alternative sequence that is the amino acid sequence set forth in SEQ ID NO:2206 or that is an amino acid sequence at least 95%, at least 96%, at least 97%, at least 98%, or at least 99% identical to the amino acid sequence set forth in SEQ ID NO:1) except that the amino acid sequence of any one of SEQ ID NOs:D2-D78 is located between amino acid positions 587 and 588 of SEQ ID NO:1 (or the appropriate amino acid positions of the alternative sequence). The capsid polypeptide can comprise the amino acid sequence of SEQ ID NO:1 (or an alternative sequence that is the amino acid sequence set forth in SEQ ID NO:2206 or that is an amino acid sequence at least 95%, at least 96%, at least 97%, at least 98%, or at least 99% identical to the amino acid sequence set forth in SEQ ID NO:1) except that the amino acid sequence of any one of SEQ ID NOs:D2-D76 is located between amino acid positions 587 and 588 of SEQ ID NO:1 (or the appropriate amino acid positions of the alternative sequence). The capsid polypeptide can comprise the amino acid sequence of SEQ ID NO:1 (or an alternative sequence that is the amino acid sequence set forth in SEQ ID NO:2206 or that is an amino acid sequence at least 95%, at least 96%, at least 97%, at least 98%, or at least 99% identical to the amino acid sequence set forth in SEQ ID NO:1) except that the amino acids from position 585 to 590 of SEQ ID NO:1 are replaced with the amino acid sequence of any one of SEQ ID NOs:D2-D78. The capsid polypeptide can comprise the amino acid sequence of SEQ ID NO:1 (or an alternative sequence that is the amino acid sequence set forth in SEQ ID NO:2206 or that is an amino acid sequence at least 95%, at least 96%, at least 97%, at least 98%, or at least 99% identical to the amino acid sequence set forth in SEQ ID NO: 1) except that the amino acids from position 585 to 590 of SEQ ID NO:1 are replaced with the amino acid sequence of any one of SEQ ID NOs:D77-D78. The mammal can be a human (or a non-human primate). The vector can be an AAV2 vector. The vector can infect greater than 2 percent of retinal cells of the parafovea region of the eye when a titer of at least 1×10⁷ of the vector is administered intravitreally. The exogenous nucleic acid sequence can encode an RNA or a polypeptide. The exogenous nucleic acid can encode an RNA. The RNA can be an siRNA or microRNA. The exogenous nucleic acid can encode a polypeptide. The polypeptide can be an ABCA4 polypeptide, a CRB1 polypeptide, an NPHP5 polypeptide, or an NR2E3 polypeptide. The vector can express more of the exogenous nucleic acid sequence in the retinal cells than the level of expression in retinal cells of a parafovea region of an eye from a comparable AAV vector comprising a capsid polypeptide consisting of the amino acid sequence set forth in SEQ ID NO:1. The method can comprise intravitreally administering a composition comprising the vector to the mammal, thereby contacting the retinal cells of the parafovea region with the vector. The composition can comprise from about 1×10⁷ to about 1×10¹⁴ of the vector.

[0071] In another aspect, this document features a method for treating a retinal condition. The method comprises (or consists essentially of, or consists of) contacting retinal cells of a parafovea region of an eye of a mammal having the retinal condition with AAV vectors comprising an AAV capsid polypeptide and an exogenous nucleic acid sequence, wherein the capsid polypeptide comprises the amino acid sequence of any one of SEQ ID NOs:D2-D78, wherein the AAV vectors infect the retinal cells and drive expression of the exogenous nucleic acid sequence within the retinal cells, thereby treating the retinal condition. The mammal can be a human (or a non-human primate). The retinal condition can be selected from the group consisting of cone dystrophy, cone/rod dystrophy, retinitis pigmentosa, macular degeneration, achromatopsia, blue cone monochromcy, and color blindness. The capsid polypeptide can comprise the amino acid sequence of SEQ ID NO:1 (or an alternative sequence that is the amino acid sequence set forth in SEQ ID NO:2206 or that is an amino acid sequence at least 95%, at least 96%, at least 97%, at least 98%, or at least 99% identical to the amino acid sequence set forth in SEQ ID NO:1) except that the amino acid sequence of any one of SEQ ID NOs:D2-D78 is located between amino acid positions 587 and 588 of SEQ ID NO:1 (or the appropriate amino acid positions of the alternative sequence). The capsid polypeptide can comprise the amino acid sequence of SEQ ID NO:1 (or an alternative sequence that is the amino acid sequence set forth in SEQ ID NO:2206 or that is an amino acid sequence at least 95%, at least 96%, at least 97%, at least 98%, or at least 99% identical to the amino acid sequence set forth in SEQ ID NO:1) except that the amino acid sequence of any one of SEQ ID NOs:D2-D76 is located between amino acid positions 587 and 588 of SEQ ID NO:1 (or the appropriate amino acid positions of the alternative sequence). The capsid polypeptide can comprise the amino acid sequence of SEQ ID NO:1 (or an alternative sequence that is the amino acid sequence set forth in SEQ ID NO:2206 or that is an amino acid sequence at least 95%, at least 96%, at least 97%, at least 98%, or at least 99% identical to the amino acid sequence set forth in SEQ ID NO:1) except that the amino acids from position 585 to 590 of SEQ ID NO:1 are replaced with the amino acid sequence of any one of SEQ ID NOs:D2-D78. The capsid polypeptide can comprise the amino acid sequence of SEQ ID NO:1 (or an alternative sequence that is the amino acid sequence set forth in SEQ ID NO:2206 or that is an amino acid sequence at least 95%, at least 96%, at least 97%, at least 98%, or at least 99% identical to the amino acid sequence set forth in SEQ ID NO:1) except that the amino acids from position 585 to 590 of SEQ ID NO:1 are replaced with the amino acid sequence of any one of SEQ ID NOs:D77-D78. The vectors can be AAV2 vectors. The vectors can infect greater than 2 percent of retinal cells of the parafovea region when a titer of at least 1×10⁷ of the vectors is administered intravitreally. The exogenous nucleic acid sequence can encode an RNA. The RNA can be an siRNA or a microRNA. The exogenous nucleic acid can encode a polypeptide. The polypeptide can be an ABCA4 polypeptide, a CRB1 polypeptide, an NPHP5 polypeptide, and an NR2E3 polypeptide. The vectors can express more of the exogenous nucleic acid sequence in the retinal cells of the parafovea region than the level of expression in retinal cells of a parafovea region from a comparable AAV vector comprising a capsid polypeptide consisting of the amino acid sequence set forth in SEQ ID NO:1. The method can comprise intravitreally administering a composition comprising the vectors to the mammal, thereby contacting the retinal cells of the parafovea region with the vectors. The composition can comprise from about 1×10⁷ to about 1×10¹⁴ of the vectors.

[0072] In another aspect, this document features an adeno-associated virus (AAV) vector comprising an AAV capsid polypeptide, wherein the capsid polypeptide comprises the amino acid sequence of any one of SEQ ID NOs:E2-E83. The capsid polypeptide can comprise the amino acid sequence of SEQ ID NO:1 (or an alternative sequence that is the amino acid sequence set forth in SEQ ID NO:2206 or that is an amino acid sequence at least 95%, at least 96%, at least 97%, at least 98%, or at least 99% identical to the amino acid sequence set forth in SEQ ID NO:1) except that the amino acid sequence of any one of SEQ ID NOs:E2-E83 is located between amino acid positions 587 and 588 of SEQ ID NO:1 (or the appropriate amino acid positions of the alternative sequence). The capsid polypeptide can comprise the amino acid sequence of SEQ ID NO:1 (or an alternative sequence that is the amino acid sequence set forth in SEQ ID NO:2206 or that is an amino acid sequence at least 95%, at least 96%, at least 97%, at least 98%, or at least 99% identical to the amino acid sequence set forth in SEQ ID NO:1) except that the amino acid sequence of any one of SEQ ID NOs:E2-E75 is located between amino acid positions 587 and 588 of SEQ ID NO:1 (or the appropriate amino acid positions of the alternative sequence). The capsid polypeptide can comprise the amino acid sequence of SEQ ID NO:1 (or an alternative sequence that is the amino acid sequence set forth in SEQ ID NO:2206 or that is an amino acid sequence at least 95%, at least 96%, at least 97%, at least 98%, or at least 99% identical to the amino acid sequence set forth in SEQ ID NO:1) except that the amino acids from position 585 to 590 of SEQ ID NO:1 are replaced with the amino acid sequence of any one of SEQ ID NOs:E2-E83. The capsid polypeptide can comprise the amino acid sequence of SEQ ID NO:1 (or an alternative sequence that is the amino acid sequence set forth in SEQ ID NO:2206 or that is an amino acid sequence at least 95%, at least 96%, at least 97%, at least 98%, or at least 99% identical to the amino acid sequence set forth in SEQ ID NO:1) except that the amino acids from position 585 to 590 of SEQ ID NO:1 are replaced with the amino acid sequence of any one of SEQ ID NOs:E76-E83. The vector can be an AAV2 vector. The vector can infect at least three different retinal cell types when a titer of at least 1×10⁷ of the vector is administered intravitreally to an eye of a human (or a non-human primate), wherein the at least three different retinal cell types are selected from the group consisting of retinal ganglion cells, amacrine cells, horizontal cells, bipolar cells, Muller glia cells, photoreceptor cells, and RPE cells. The vector can comprise an exogenous nucleic acid encoding an RNA or a polypeptide. The exogenous nucleic acid can encode an RNA. The RNA can be an siRNA or microRNA. The exogenous nucleic acid can encode a polypeptide. The polypeptide can be an ABCA4 polypeptide, a CRB1 polypeptide, an NPHP5 polypeptide, or an NR2E3 polypeptide. The vector can express more nucleic acid in at least three different retinal cell types than the level of expression from a comparable AAV vector comprising a capsid polypeptide consisting of the amino acid sequence set forth in SEQ ID NO:1, wherein the at least three different retinal cell types are selected from the group consisting of retinal ganglion cells, amacrine cells, horizontal cells, bipolar cells, Muller glia cells, photoreceptor cells, and RPE cells.

[0073] In another aspect, this document features an AAV capsid polypeptide comprising the amino acid sequence of any one of SEQ ID NOs:E2-E83. The polypeptide can comprise the amino acid sequence of SEQ ID NO:1 (or an alternative sequence that is the amino acid sequence set forth in SEQ ID NO:2206 or that is an amino acid sequence at least 95%, at least 96%, at least 97%, at least 98%, or at least 99% identical to the amino acid sequence set forth in SEQ ID NO:1) except that the amino acid sequence of any one of SEQ ID NOs:E2-E83 is located between amino acid positions 587 and 588 of SEQ ID NO:1 (or the appropriate amino acid positions of the alternative sequence). The polypeptide can comprise the amino acid sequence of SEQ ID NO:1 (or an alternative sequence that is the amino acid sequence set forth in SEQ ID NO:2206 or that is an amino acid sequence at least 95%, at least 96%, at least 97%, at least 98%, or at least 99% identical to the amino acid sequence set forth in SEQ ID NO:1) except that the amino acid sequence of any one of SEQ ID NOs:E2-E75 is located between amino acid positions 587 and 588 of SEQ ID NO:1 (or the appropriate amino acid positions of the alternative sequence). The polypeptide can comprise the amino acid sequence of SEQ ID NO:1 (or an alternative sequence that is the amino acid sequence set forth in SEQ ID NO:2206 or that is an amino acid sequence at least 95%, at least 96%, at least 97%, at least 98%, or at least 99% identical to the amino acid sequence set forth in SEQ ID NO: 1) except that the amino acids from position 585 to 590 of SEQ ID NO:1 are replaced with the amino acid sequence of any one of SEQ ID NOs:E2-E83. The polypeptide can comprise the amino acid sequence of SEQ ID NO:1 (or an alternative sequence that is the amino acid sequence set forth in SEQ ID NO:2206 or that is an amino acid sequence at least 95%, at least 96%, at least 97%, at least 98%, or at least 99% identical to the amino acid sequence set forth in SEQ ID NO: 1) except that the amino acids from position 585 to 590 of SEQ ID NO:1 are replaced with the amino acid sequence of any one of SEQ ID NOs:E76-E83. An AAV vector comprising the polypeptide can infect at least three different retinal cell types when a titer of at least 1×10⁷ of the vector is administered intravitreally to an eye of a human (or a non-human primate), wherein the at least three different retinal cell types are selected from the group consisting of retinal ganglion cells, amacrine cells, horizontal cells, bipolar cells, Muller glia cells, photoreceptor cells, and RPE cells. An AAV vector comprising the polypeptide can express more nucleic acid in at least three different retinal cell types than the level of expression from a comparable AAV vector comprising a capsid polypeptide consisting of the amino acid sequence set forth in SEQ ID NO:1, wherein the at least three different retinal cell types are selected from the group consisting of retinal ganglion cells, amacrine cells, horizontal cells, bipolar cells, Muller glia cells, photoreceptor cells, and RPE cells.

[0074] In another aspect, this document features a nucleic acid molecule encoding an AAV vector comprising an AAV capsid polypeptide, wherein the capsid polypeptide comprises the amino acid sequence of any one of SEQ ID NOs:E2-E83. The capsid polypeptide can comprise the amino acid sequence of SEQ ID NO:1 (or an alternative sequence that is the amino acid sequence set forth in SEQ ID NO:2206 or that is an amino acid sequence at least 95%, at least 96%, at least 97%, at least 98%, or at least 99% identical to the amino acid sequence set forth in SEQ ID NO:1) except that the amino acid sequence of any one of SEQ ID NOs:E2-E83 is located between amino acid positions 587 and 588 of SEQ ID NO:1 (or the appropriate amino acid positions of the alternative sequence). The capsid polypeptide can comprise the amino acid sequence of SEQ ID NO:1 (or an alternative sequence that is the amino acid sequence set forth in SEQ ID NO:2206 or that is an amino acid sequence at least 95%, at least 96%, at least 97%, at least 98%, or at least 99% identical to the amino acid sequence set forth in SEQ ID NO:1) except that the amino acid sequence of any one of SEQ ID NOs:E2-E75 is located between amino acid positions 587 and 588 of SEQ ID NO:1 (or the appropriate amino acid positions of the alternative sequence). The capsid polypeptide can comprise the amino acid sequence of SEQ ID NO:1 (or an alternative sequence that is the amino acid sequence set forth in SEQ ID NO:2206 or that is an amino acid sequence at least 95%, at least 96%, at least 97%, at least 98%, or at least 99% identical to the amino acid sequence set forth in SEQ ID NO:1) except that the amino acids from position 585 to 590 of SEQ ID NO:1 are replaced with the amino acid sequence of any one of SEQ ID NOs:E2-E83. The capsid polypeptide can comprise the amino acid sequence of SEQ ID NO:1 (or an alternative sequence that is the amino acid sequence set forth in SEQ ID NO:2206 or that is an amino acid sequence at least 95%, at least 96%, at least 97%, at least 98%, or at least 99% identical to the amino acid sequence set forth in SEQ ID NO:1) except that the amino acids from position 585 to 590 of SEQ ID NO:1 are replaced with the amino acid sequence of any one of SEQ ID NOs:E76-E83. The vector can be an AAV2 vector. The vector can infect at least three different retinal cell types when a titer of at least 1×10⁷ of the vector is administered intravitreally to an eye of a human (or a non-human primate), wherein the at least three different retinal cell types are selected from the group consisting of retinal ganglion cells, amacrine cells, horizontal cells, bipolar cells, Muller glia cells, photoreceptor cells, and RPE cells. The vector can comprise an exogenous nucleic acid encoding an RNA or a polypeptide. The exogenous nucleic acid can encode an RNA. The RNA can be an siRNA or microRNA. The exogenous nucleic acid can encode a polypeptide. The polypeptide can be an ABCA4 polypeptide, a CRB1 polypeptide, an NPHP5 polypeptide, or an NR2E3 polypeptide. The vector can express more nucleic acid in at least three different retinal cell types than the level of expression from a comparable AAV vector comprising a capsid polypeptide consisting of the amino acid sequence set forth in SEQ ID NO:1, wherein the at least three different retinal cell types are selected from the group consisting of retinal ganglion cells, amacrine cells, horizontal cells, bipolar cells, Muller glia cells, photoreceptor cells, and RPE cells. The nucleic acid molecule can be DNA.

[0075] In another aspect, this document features a nucleic acid molecule encoding an AAV capsid polypeptide comprising the amino acid sequence of any one of SEQ ID NOs:E2-E83. The polypeptide can comprise the amino acid sequence of SEQ ID NO:1 (or an alternative sequence that is the amino acid sequence set forth in SEQ ID NO:2206 or that is an amino acid sequence at least 95%, at least 96%, at least 97%, at least 98%, or at least 99% identical to the amino acid sequence set forth in SEQ ID NO:1) except that the amino acid sequence of any one of SEQ ID NOs:E2-E83 is located between amino acid positions 587 and 588 of SEQ ID NO:1 (or the appropriate amino acid positions of the alternative sequence). The polypeptide can comprise the amino acid sequence of SEQ ID NO:1 (or an alternative sequence that is the amino acid sequence set forth in SEQ ID NO:2206 or that is an amino acid sequence at least 95%, at least 96%, at least 97%, at least 98%, or at least 99% identical to the amino acid sequence set forth in SEQ ID NO:1) except that the amino acid sequence of any one of SEQ ID NOs:E2-E75 is located between amino acid positions 587 and 588 of SEQ ID NO:1 (or the appropriate amino acid positions of the alternative sequence). The polypeptide can comprise the amino acid sequence of SEQ ID NO:1 (or an alternative sequence that is the amino acid sequence set forth in SEQ ID NO:2206 or that is an amino acid sequence at least 95%, at least 96%, at least 97%, at least 98%, or at least 99% identical to the amino acid sequence set forth in SEQ ID NO:1) except that the amino acids from position 585 to 590 of SEQ ID NO:1 are replaced with the amino acid sequence of any one of SEQ ID NOs:E2-E83. The polypeptide can comprise the amino acid sequence of SEQ ID NO:1 (or an alternative sequence that is the amino acid sequence set forth in SEQ ID NO:2206 or that is an amino acid sequence at least 95%, at least 96%, at least 97%, at least 98%, or at least 99% identical to the amino acid sequence set forth in SEQ ID NO:1) except that the amino acids from position 585 to 590 of SEQ ID NO:1 are replaced with the amino acid sequence of any one of SEQ ID NOs:E76-E83. An AAV vector comprising the polypeptide can infect at least three different retinal cell types when a titer of at least 1×10⁷ of the vector is administered intravitreally to an eye of a human (or a non-human primate), wherein the at least three different retinal cell types are selected from the group consisting of retinal ganglion cells, amacrine cells, horizontal cells, bipolar cells, Muller glia cells, photoreceptor cells, and RPE cells. An AAV vector comprising the polypeptide can express more nucleic acid in at least three different retinal cell types than the level of expression from a comparable AAV vector comprising a capsid polypeptide consisting of the amino acid sequence set forth in SEQ ID NO:1, wherein the at least three different retinal cell types are selected from the group consisting of retinal ganglion cells, amacrine cells, horizontal cells, bipolar cells, Muller glia cells, photoreceptor cells, and RPE cells. The nucleic acid molecule can be DNA.

[0076] In another aspect, this document features a host cell comprising a nucleic acid molecule of either of the two preceding paragraphs. The host cell can express the vector. The host cell can express the polypeptide.

[0077] In another aspect, this document features a host cell comprising an AAV vector comprising an AAV capsid polypeptide, wherein the capsid polypeptide comprises the amino acid sequence of any one of SEQ ID NOs:E2-E83. The capsid polypeptide can comprise the amino acid sequence of SEQ ID NO:1 (or an alternative sequence that is the amino acid sequence set forth in SEQ ID NO:2206 or that is an amino acid sequence at least 95%, at least 96%, at least 97%, at least 98%, or at least 99% identical to the amino acid sequence set forth in SEQ ID NO:1) except that the amino acid sequence of any one of SEQ ID NOs:E2-E83 is located between amino acid positions 587 and 588 of SEQ ID NO:1 (or the appropriate amino acid positions of the alternative sequence). The capsid polypeptide can comprise the amino acid sequence of SEQ ID NO:1 (or an alternative sequence that is the amino acid sequence set forth in SEQ ID NO:2206 or that is an amino acid sequence at least 95%, at least 96%, at least 97%, at least 98%, or at least 99% identical to the amino acid sequence set forth in SEQ ID NO:1) except that the amino acid sequence of any one of SEQ ID NOs:E2-E75 is located between amino acid positions 587 and 588 of SEQ ID NO:1 (or the appropriate amino acid positions of the alternative sequence). The capsid polypeptide can comprise the amino acid sequence of SEQ ID NO:1 (or an alternative sequence that is the amino acid sequence set forth in SEQ ID NO:2206 or that is an amino acid sequence at least 95%, at least 96%, at least 97%, at least 98%, or at least 99% identical to the amino acid sequence set forth in SEQ ID NO:1) except that the amino acids from position 585 to 590 of SEQ ID NO:1 are replaced with the amino acid sequence of any one of SEQ ID NOs:E2-E83. The capsid polypeptide can comprise the amino acid sequence of SEQ ID NO:1 (or an alternative sequence that is the amino acid sequence set forth in SEQ ID NO:2206 or that is an amino acid sequence at least 95%, at least 96%, at least 97%, at least 98%, or at least 99% identical to the amino acid sequence set forth in SEQ ID NO:1) except that the amino acids from position 585 to 590 of SEQ ID NO:1 are replaced with the amino acid sequence of any one of SEQ ID NOs:E76-E83. The vector can be an AAV2 vector. The vector can infect at least three different retinal cell types when a titer of at least 1×10⁷ of the vector is administered intravitreally to an eye of a human (or a non-human primate), wherein the at least three different retinal cell types are selected from the group consisting of retinal ganglion cells, amacrine cells, horizontal cells, bipolar cells, Muller glia cells, photoreceptor cells, and RPE cells. The vector can comprise an exogenous nucleic acid encoding an RNA or a polypeptide.

[0078] The exogenous nucleic acid can encode an RNA. The RNA can be an siRNA or microRNA. The exogenous nucleic acid can encode a polypeptide. The polypeptide can be an ABCA4 polypeptide, a CRB1 polypeptide, an NPHP5 polypeptide, or an NR2E3 polypeptide. The vector can express more nucleic acid in at least three different retinal cell types than the level of expression from a comparable AAV vector comprising a capsid polypeptide consisting of the amino acid sequence set forth in SEQ ID NO:1, wherein the at least three different retinal cell types are selected from the group consisting of retinal ganglion cells, amacrine cells, horizontal cells, bipolar cells, Muller glia cells, photoreceptor cells, and RPE cells. The host cell can be a retinal cell.

[0079] In another aspect, this document features a host cell comprising an AAV capsid polypeptide comprising the amino acid sequence of any one of SEQ ID NOs:E2-E83. The polypeptide can comprise the amino acid sequence of SEQ ID NO:1 (or an alternative sequence that is the amino acid sequence set forth in SEQ ID NO:2206 or that is an amino acid sequence at least 95%, at least 96%, at least 97%, at least 98%, or at least 99% identical to the amino acid sequence set forth in SEQ ID NO:1) except that the amino acid sequence of any one of SEQ ID NOs:E2-E83 is located between amino acid positions 587 and 588 of SEQ ID NO:1 (or the appropriate amino acid positions of the alternative sequence). The polypeptide can comprise the amino acid sequence of SEQ ID NO:1 (or an alternative sequence that is the amino acid sequence set forth in SEQ ID NO:2206 or that is an amino acid sequence at least 95%, at least 96%, at least 97%, at least 98%, or at least 99% identical to the amino acid sequence set forth in SEQ ID NO:1) except that the amino acid sequence of any one of SEQ ID NOs:E2-E75 is located between amino acid positions 587 and 588 of SEQ ID NO:1 (or the appropriate amino acid positions of the alternative sequence). The polypeptide can comprise the amino acid sequence of SEQ ID NO:1 (or an alternative sequence that is the amino acid sequence set forth in SEQ ID NO:2206 or that is an amino acid sequence at least 95%, at least 96%, at least 97%, at least 98%, or at least 99% identical to the amino acid sequence set forth in SEQ ID NO:1) except that the amino acids from position 585 to 590 of SEQ ID NO:1 are replaced with the amino acid sequence of any one of SEQ ID NOs:E2-E83. The polypeptide can comprise the amino acid sequence of SEQ ID NO:1 (or an alternative sequence that is the amino acid sequence set forth in SEQ ID NO:2206 or that is an amino acid sequence at least 95%, at least 96%, at least 97%, at least 98%, or at least 99% identical to the amino acid sequence set forth in SEQ ID NO:1) except that the amino acids from position 585 to 590 of SEQ ID NO:1 are replaced with the amino acid sequence of any one of SEQ ID NOs:E76-E83. An AAV vector comprising the polypeptide can infect at least three different retinal cell types when a titer of at least 1×10⁷ of the vector is administered intravitreally to an eye of a human (or a non-human primate), wherein the at least three different retinal cell types are selected from the group consisting of retinal ganglion cells, amacrine cells, horizontal cells, bipolar cells, Muller glia cells, photoreceptor cells, and RPE cells. An AAV vector comprising the polypeptide can express more nucleic acid in at least three different retinal cell types than the level of expression from a comparable AAV vector comprising a capsid polypeptide consisting of the amino acid sequence set forth in SEQ ID NO:1, wherein the at least three different retinal cell types are selected from the group consisting of retinal ganglion cells, amacrine cells, horizontal cells, bipolar cells, Muller glia cells, photoreceptor cells, and RPE cells. The host cell can be a retinal cell.

[0080] In another aspect, this document features a composition comprising an AAV vector comprising an AAV capsid polypeptide, wherein the capsid polypeptide comprises the amino acid sequence of any one of SEQ ID NOs:E2-E83. The capsid polypeptide can comprise the amino acid sequence of SEQ ID NO:1 (or an alternative sequence that is the amino acid sequence set forth in SEQ ID NO:2206 or that is an amino acid sequence at least 95%, at least 96%, at least 97%, at least 98%, or at least 99% identical to the amino acid sequence set forth in SEQ ID NO:1) except that the amino acid sequence of any one of SEQ ID NOs:E2-E83 is located between amino acid positions 587 and 588 of SEQ ID NO:1 (or the appropriate amino acid positions of the alternative sequence). The capsid polypeptide can comprise the amino acid sequence of SEQ ID NO:1 (or an alternative sequence that is the amino acid sequence set forth in SEQ ID NO:2206 or that is an amino acid sequence at least 95%, at least 96%, at least 97%, at least 98%, or at least 99% identical to the amino acid sequence set forth in SEQ ID NO:1) except that the amino acid sequence of any one of SEQ ID NOs:E2-E75 is located between amino acid positions 587 and 588 of SEQ ID NO:1 (or the appropriate amino acid positions of the alternative sequence). The capsid polypeptide can comprise the amino acid sequence of SEQ ID NO:1 (or an alternative sequence that is the amino acid sequence set forth in SEQ ID NO:2206 or that is an amino acid sequence at least 95%, at least 96%, at least 97%, at least 98%, or at least 99% identical to the amino acid sequence set forth in SEQ ID NO:1) except that the amino acids from position 585 to 590 of SEQ ID NO:1 are replaced with the amino acid sequence of any one of SEQ ID NOs:E2-E83. The capsid polypeptide can comprise the amino acid sequence of SEQ ID NO:1 (or an alternative sequence that is the amino acid sequence set forth in SEQ ID NO:2206 or that is an amino acid sequence at least 95%, at least 96%, at least 97%, at least 98%, or at least 99% identical to the amino acid sequence set forth in SEQ ID NO:1) except that the amino acids from position 585 to 590 of SEQ ID NO:1 are replaced with the amino acid sequence of any one of SEQ ID NOs:E76-E83. The vector can be an AAV2 vector. The vector can infect at least three different retinal cell types when a titer of at least 1×10⁷ of the vector is administered intravitreally to an eye of a human (or a non-human primate), wherein the at least three different retinal cell types are selected from the group consisting of retinal ganglion cells, amacrine cells, horizontal cells, bipolar cells, Muller glia cells, photoreceptor cells, and RPE cells. The vector can comprise an exogenous nucleic acid encoding an RNA or a polypeptide. The exogenous nucleic acid can encode an RNA. The RNA can be an siRNA or microRNA. The exogenous nucleic acid can encode a polypeptide. The polypeptide can be an ABCA4 polypeptide, a CRB1 polypeptide, an NPHP5 polypeptide, or an NR2E3 polypeptide. The vector can express more nucleic acid in at least three different retinal cell types than the level of expression from a comparable AAV vector comprising a capsid polypeptide consisting of the amino acid sequence set forth in SEQ ID NO:1, wherein the at least three different retinal cell types are selected from the group consisting of retinal ganglion cells, amacrine cells, horizontal cells, bipolar cells, Muller glia cells, photoreceptor cells, and RPE cells. The composition can comprise from about 1×10⁷ to about 1×10¹⁴ of the vector. The composition can comprise phosphate buffered saline, Hank's Balanced Salt Solution, or Pluronic F68.

[0081] In another aspect, this document features a method for delivering an exogenous nucleic acid sequence to at least three different retinal cell types of an eye of a mammal. The method comprises (or consists essentially of, or consists of) contacting the at least three different retinal cell types with an AAV vector comprising an AAV capsid polypeptide and the exogenous nucleic acid sequence, wherein the capsid polypeptide comprises the amino acid sequence of any one of SEQ ID NOs:E2-E83, wherein the AAV vector infects the at least three different retinal cell types, thereby delivering the exogenous nucleic acid sequence to the at least three different retinal cell types, wherein the at least three different retinal cell types are selected from the group consisting of retinal ganglion cells, amacrine cells, horizontal cells, bipolar cells, Muller glia cells, photoreceptor cells, and RPE cells. The capsid polypeptide can comprise the amino acid sequence of SEQ ID NO:1 (or an alternative sequence that is the amino acid sequence set forth in SEQ ID NO:2206 or that is an amino acid sequence at least 95%, at least 96%, at least 97%, at least 98%, or at least 99% identical to the amino acid sequence set forth in SEQ ID NO:1) except that the amino acid sequence of any one of SEQ ID NOs:E2-E83 is located between amino acid positions 587 and 588 of SEQ ID NO:1 (or the appropriate amino acid positions of the alternative sequence). The capsid polypeptide can comprise the amino acid sequence of SEQ ID NO:1 (or an alternative sequence that is the amino acid sequence set forth in SEQ ID NO:2206 or that is an amino acid sequence at least 95%, at least 96%, at least 97%, at least 98%, or at least 99% identical to the amino acid sequence set forth in SEQ ID NO:1) except that the amino acid sequence of any one of SEQ ID NOs:E2-E75 is located between amino acid positions 587 and 588 of SEQ ID NO:1 (or the appropriate amino acid positions of the alternative sequence). The capsid polypeptide can comprise the amino acid sequence of SEQ ID NO:1 (or an alternative sequence that is the amino acid sequence set forth in SEQ ID NO:2206 or that is an amino acid sequence at least 95%, at least 96%, at least 97%, at least 98%, or at least 99% identical to the amino acid sequence set forth in SEQ ID NO:1) except that the amino acids from position 585 to 590 of SEQ ID NO:1 are replaced with the amino acid sequence of any one of SEQ ID NOs:E2-E83. The capsid polypeptide can comprise the amino acid sequence of SEQ ID NO:1 (or an alternative sequence that is the amino acid sequence set forth in SEQ ID NO:2206 or that is an amino acid sequence at least 95%, at least 96%, at least 97%, at least 98%, or at least 99% identical to the amino acid sequence set forth in SEQ ID NO: 1) except that the amino acids from position 585 to 590 of SEQ ID NO:1 are replaced with the amino acid sequence of any one of SEQ ID NOs:E76-E83. The mammal can be a human (or a non-human primate). The vector can be an AAV2 vector. The vector can infect greater than 2 percent of the at least three different retinal cell types within an eye when a titer of at least 1×10⁷ of the vector is administered intravitreally to the eye. The exogenous nucleic acid sequence can encode an RNA or a polypeptide. The exogenous nucleic acid can encode an RNA. The RNA can be an siRNA or microRNA. The exogenous nucleic acid can encode a polypeptide. The polypeptide can be an ABCA4 polypeptide, a CRB1 polypeptide, an NPHP5 polypeptide, or an NR2E3 polypeptide. The vector can express more of the exogenous nucleic acid sequence in the at least three different retinal cell types than the level of expression in the at least three different retinal cell types from a comparable AAV vector comprising a capsid polypeptide consisting of the amino acid sequence set forth in SEQ ID NO:1. The method can comprise intravitreally administering a composition comprising the vector to the mammal, thereby contacting the at least three different retinal cell types with the vector. The composition can comprise from about 1×10⁷ to about 1×10¹⁴ of the vector.

[0082] In another aspect, this document features a method for treating a retinal condition. The method comprises (or consists essentially of, or consists of) contacting at least three different retinal cell types of an eye of a mammal having the retinal condition with AAV vectors comprising an AAV capsid polypeptide and an exogenous nucleic acid sequence, wherein the capsid polypeptide comprises the amino acid sequence of any one of SEQ ID NOs:E2-E83, wherein the AAV vectors infect the at least three different retinal cell types and drive expression of the exogenous nucleic acid sequence within the at least three different retinal cell types, thereby treating the retinal condition. The mammal can be a human (or a non-human primate). The retinal condition can be selected from the group consisting of cone dystrophy, cone/rod dystrophy, retinitis pigmentosa, macular degeneration, achromatopsia, blue cone monochromcy, and color blindness. The capsid polypeptide can comprise the amino acid sequence of SEQ ID NO:1 (or an alternative sequence that is the amino acid sequence set forth in SEQ ID NO:2206 or that is an amino acid sequence at least 95%, at least 96%, at least 97%, at least 98%, or at least 99% identical to the amino acid sequence set forth in SEQ ID NO:1) except that the amino acid sequence of any one of SEQ ID NOs:E2-E83 is located between amino acid positions 587 and 588 of SEQ ID NO:1 (or the appropriate amino acid positions of the alternative sequence). The capsid polypeptide can comprise the amino acid sequence of SEQ ID NO:1 (or an alternative sequence that is the amino acid sequence set forth in SEQ ID NO:2206 or that is an amino acid sequence at least 95%, at least 96%, at least 97%, at least 98%, or at least 99% identical to the amino acid sequence set forth in SEQ ID NO:1) except that the amino acid sequence of any one of SEQ ID NOs:E2-E75 is located between amino acid positions 587 and 588 of SEQ ID NO:1 (or the appropriate amino acid positions of the alternative sequence). The capsid polypeptide can comprise the amino acid sequence of SEQ ID NO:1 (or an alternative sequence that is the amino acid sequence set forth in SEQ ID NO:2206 or that is an amino acid sequence at least 95%, at least 96%, at least 97%, at least 98%, or at least 99% identical to the amino acid sequence set forth in SEQ ID NO:1) except that the amino acids from position 585 to 590 of SEQ ID NO:1 are replaced with the amino acid sequence of any one of SEQ ID NOs:E2-E83. The capsid polypeptide can comprise the amino acid sequence of SEQ ID NO:1 (or an alternative sequence that is the amino acid sequence set forth in SEQ ID NO:2206 or that is an amino acid sequence at least 95%, at least 96%, at least 97%, at least 98%, or at least 99% identical to the amino acid sequence set forth in SEQ ID NO:1) except that the amino acids from position 585 to 590 of SEQ ID NO:1 are replaced with the amino acid sequence of any one of SEQ ID NOs:E76-E83. The vectors can be AAV2 vectors. The vectors can infect greater than 2 percent of the at least three different retinal cell types within the eye when a titer of at least 1×10⁷ of the vectors is administered intravitreally. The exogenous nucleic acid sequence can encode an RNA. The RNA can be an siRNA or microRNA. The exogenous nucleic acid can encode a polypeptide. The polypeptide can be an ABCA4 polypeptide, a CRB1 polypeptide, an NPHP5 polypeptide, or an NR2E3 polypeptide. The vectors can express more of the exogenous nucleic acid sequence in the at least three different retinal cell types than the level of expression in the at least three different retinal cell types from a comparable AAV vector comprising a capsid polypeptide consisting of the amino acid sequence set forth in SEQ ID NO:1. The method can comprise intravitreally administering a composition comprising the vectors to the mammal, thereby contacting the at least three different retinal cell types with the vectors. The composition can comprise from about 1×10⁷ to about 1×10¹⁴ of the vector. The at least three different retinal cell types can be selected from the group consisting of retinal ganglion cells, amacrine cells, horizontal cells, bipolar cells, Muller glia cells, photoreceptor cells, and RPE cells.

[0083] In another aspect, this document features an adeno-associated virus (AAV) vector comprising an AAV capsid polypeptide, wherein the capsid polypeptide comprises the amino acid sequence of any one of SEQ ID NOs:F2-F10. The capsid polypeptide can comprise the amino acid sequence of SEQ ID NO:1 (or an alternative sequence that is the amino acid sequence set forth in SEQ ID NO:2206 or that is an amino acid sequence at least 95%, at least 96%, at least 97%, at least 98%, or at least 99% identical to the amino acid sequence set forth in SEQ ID NO:1) except that the amino acid sequence of any one of SEQ ID NOs:F2-F10 is located between amino acid positions 587 and 588 of SEQ ID NO:1 (or the appropriate amino acid positions of the alternative sequence). The capsid polypeptide can comprise the amino acid sequence of SEQ ID NO:1 (or an alternative sequence that is the amino acid sequence set forth in SEQ ID NO:2206 or that is an amino acid sequence at least 95%, at least 96%, at least 97%, at least 98%, or at least 99% identical to the amino acid sequence set forth in SEQ ID NO:1) except that the amino acid sequence of any one of SEQ ID NOs:F2-F5 is located between amino acid positions 587 and 588 of SEQ ID NO:1 (or the appropriate amino acid positions of the alternative sequence). The capsid polypeptide can comprise the amino acid sequence of SEQ ID NO:1 (or an alternative sequence that is the amino acid sequence set forth in SEQ ID NO:2206 or that is an amino acid sequence at least 95%, at least 96%, at least 97%, at least 98%, or at least 99% identical to the amino acid sequence set forth in SEQ ID NO:1) except that the amino acid sequence of any one of SEQ ID NOs:F6-F10 is located between amino acid positions 587 and 588 of SEQ ID NO:1 (or the appropriate amino acid positions of the alternative sequence). The capsid polypeptide can comprise the amino acid sequence of SEQ ID NO:1 (or an alternative sequence that is the amino acid sequence set forth in SEQ ID NO:2206 or that is an amino acid sequence at least 95%, at least 96%, at least 97%, at least 98%, or at least 99% identical to the amino acid sequence set forth in SEQ ID NO:1) except that the amino acids from position 585 to 590 of SEQ ID NO:1 are replaced with the amino acid sequence of any one of SEQ ID NOs:F2-F10. The vector can be an AAV2 vector. The vector can infect greater than 2 percent of RPE cells when a titer of at least 1×10⁷ of the vector is administered intravitreally to an eye of a human (or a non-human primate). The vector can comprise an exogenous nucleic acid encoding an RNA or a polypeptide. The exogenous nucleic acid can encode an RNA. The RNA can be an siRNA or microRNA. The exogenous nucleic acid can encode a polypeptide. The polypeptide can be an ABCA4 polypeptide, a CRB1 polypeptide, an NPHP5 polypeptide, or an NR2E3 polypeptide. The vector can express more nucleic acid in RPE cells than the level of expression from a comparable AAV vector comprising a capsid polypeptide consisting of the amino acid sequence set forth in SEQ ID NO:1.

[0084] In another aspect, this document features an AAV capsid polypeptide comprising the amino acid sequence of any one of SEQ ID NOs:F2-F10. The capsid polypeptide can comprise the amino acid sequence of SEQ ID NO:1 (or an alternative sequence that is the amino acid sequence set forth in SEQ ID NO:2206 or that is an amino acid sequence at least 95%, at least 96%, at least 97%, at least 98%, or at least 99% identical to the amino acid sequence set forth in SEQ ID NO:1) except that the amino acid sequence of any one of SEQ ID NOs:F2-F10 is located between amino acid positions 587 and 588 of SEQ ID NO:1 (or the appropriate amino acid positions of the alternative sequence). The capsid polypeptide can comprise the amino acid sequence of SEQ ID NO:1 (or an alternative sequence that is the amino acid sequence set forth in SEQ ID NO:2206 or that is an amino acid sequence at least 95%, at least 96%, at least 97%, at least 98%, or at least 99% identical to the amino acid sequence set forth in SEQ ID NO:1) except that the amino acid sequence of any one of SEQ ID NOs:F2-F5 is located between amino acid positions 587 and 588 of SEQ ID NO:1 (or the appropriate amino acid positions of the alternative sequence). The capsid polypeptide can comprise the amino acid sequence of SEQ ID NO:1 (or an alternative sequence that is the amino acid sequence set forth in SEQ ID NO:2206 or that is an amino acid sequence at least 95%, at least 96%, at least 97%, at least 98%, or at least 99% identical to the amino acid sequence set forth in SEQ ID NO:1) except that the amino acid sequence of any one of SEQ ID NOs:F6-F10 is located between amino acid positions 587 and 588 of SEQ ID NO:1 (or the appropriate amino acid positions of the alternative sequence). The capsid polypeptide can comprise the amino acid sequence of SEQ ID NO:1 (or an alternative sequence that is the amino acid sequence set forth in SEQ ID NO:2206 or that is an amino acid sequence at least 95%, at least 96%, at least 97%, at least 98%, or at least 99% identical to the amino acid sequence set forth in SEQ ID NO:1) except that the amino acids from position 585 to 590 of SEQ ID NO:1 are replaced with the amino acid sequence of any one of SEQ ID NOs:F2-F10. An AAV vector comprising the polypeptide can infect greater than 2 percent of RPE cells when a titer of at least 1×10⁷ of the vector is administered intravitreally to an eye of a human (or a non-human primate). An AAV vector comprising the polypeptide can express more nucleic acid in RPE cells than the level of expression from a comparable AAV vector comprising a capsid polypeptide consisting of the amino acid sequence set forth in SEQ ID NO:1.

[0085] In another aspect, this document features a nucleic acid molecule encoding an AAV vector comprising an AAV capsid polypeptide, wherein the capsid polypeptide comprises the amino acid sequence of any one of SEQ ID NOs:F2-F10. The capsid polypeptide can comprise the amino acid sequence of SEQ ID NO:1 (or an alternative sequence that is the amino acid sequence set forth in SEQ ID NO:2206 or that is an amino acid sequence at least 95%, at least 96%, at least 97%, at least 98%, or at least 99% identical to the amino acid sequence set forth in SEQ ID NO:1) except that the amino acid sequence of any one of SEQ ID NOs:F2-F10 is located between amino acid positions 587 and 588 of SEQ ID NO:1 (or the appropriate amino acid positions of the alternative sequence). The capsid polypeptide can comprise the amino acid sequence of SEQ ID NO:1 (or an alternative sequence that is the amino acid sequence set forth in SEQ ID NO:2206 or that is an amino acid sequence at least 95%, at least 96%, at least 97%, at least 98%, or at least 99% identical to the amino acid sequence set forth in SEQ ID NO:1) except that the amino acid sequence of any one of SEQ ID NOs:F2-F5 is located between amino acid positions 587 and 588 of SEQ ID NO:1 (or the appropriate amino acid positions of the alternative sequence). The capsid polypeptide can comprise the amino acid sequence of SEQ ID NO:1 (or an alternative sequence that is the amino acid sequence set forth in SEQ ID NO:2206 or that is an amino acid sequence at least 95%, at least 96%, at least 97%, at least 98%, or at least 99% identical to the amino acid sequence set forth in SEQ ID NO: 1) except that the amino acid sequence of any one of SEQ ID NOs:F6-F10 is located between amino acid positions 587 and 588 of SEQ ID NO:1 (or the appropriate amino acid positions of the alternative sequence). The capsid polypeptide can comprise the amino acid sequence of SEQ ID NO:1 (or an alternative sequence that is the amino acid sequence set forth in SEQ ID NO:2206 or that is an amino acid sequence at least 95%, at least 96%, at least 97%, at least 98%, or at least 99% identical to the amino acid sequence set forth in SEQ ID NO:1) except that the amino acids from position 585 to 590 of SEQ ID NO:1 are replaced with the amino acid sequence of any one of SEQ ID NOs:F2-F10. The vector can be an AAV2 vector. The vector can infect greater than 2 percent of RPE cells when a titer of at least 1×10⁷ of the vector is administered intravitreally to an eye of a human (or a non-human primate). The vector can comprise an exogenous nucleic acid encoding an RNA or a polypeptide. The exogenous nucleic acid can encode an RNA. The RNA can be an siRNA or microRNA. The exogenous nucleic acid can encode a polypeptide. The polypeptide can be an ABCA4 polypeptide, a CRB1 polypeptide, an NPHP5 polypeptide, or an N1R2E3 polypeptide. The vector can express more nucleic acid in RPE cells than the level of expression from a comparable AAV vector comprising a capsid polypeptide consisting of the amino acid sequence set forth in SEQ ID NO:1. The nucleic acid molecule can be DNA.

[0086] In another aspect, this document features a nucleic acid molecule encoding an AAV capsid polypeptide comprising the amino acid sequence of any one of SEQ ID NOs:F2-F10. The capsid polypeptide can comprise the amino acid sequence of SEQ ID NO:1 (or an alternative sequence that is the amino acid sequence set forth in SEQ ID NO:2206 or that is an amino acid sequence at least 95%, at least 96%, at least 97%, at least 98%, or at least 99% identical to the amino acid sequence set forth in SEQ ID NO:1) except that the amino acid sequence of any one of SEQ ID NOs:F2-F10 is located between amino acid positions 587 and 588 of SEQ ID NO:1 (or the appropriate amino acid positions of the alternative sequence). The capsid polypeptide can comprise the amino acid sequence of SEQ ID NO:1 (or an alternative sequence that is the amino acid sequence set forth in SEQ ID NO:2206 or that is an amino acid sequence at least 95%, at least 96%, at least 97%, at least 98%, or at least 99% identical to the amino acid sequence set forth in SEQ ID NO:1) except that the amino acid sequence of any one of SEQ ID NOs:F2-F5 is located between amino acid positions 587 and 588 of SEQ ID NO:1 (or the appropriate amino acid positions of the alternative sequence). The capsid polypeptide can comprise the amino acid sequence of SEQ ID NO:1 (or an alternative sequence that is the amino acid sequence set forth in SEQ ID NO:2206 or that is an amino acid sequence at least 95%, at least 96%, at least 97%, at least 98%, or at least 99% identical to the amino acid sequence set forth in SEQ ID NO:1) except that the amino acid sequence of any one of SEQ ID NOs:F6-F10 is located between amino acid positions 587 and 588 of SEQ ID NO:1 (or the appropriate amino acid positions of the alternative sequence). The capsid polypeptide can comprise the amino acid sequence of SEQ ID NO:1 (or an alternative sequence that is the amino acid sequence set forth in SEQ ID NO:2206 or that is an amino acid sequence at least 95%, at least 96%, at least 97%, at least 98%, or at least 99% identical to the amino acid sequence set forth in SEQ ID NO:1) except that the amino acids from position 585 to 590 of SEQ ID NO:1 are replaced with the amino acid sequence of any one of SEQ ID NOs:F2-F10. An AAV vector comprising the polypeptide can infect greater than 2 percent of RPE cells when a titer of at least 1×10⁷ of the vector is administered intravitreally to an eye of a human (or a non-human primate). An AAV vector comprising the polypeptide can express more nucleic acid in RPE cells than the level of expression from a comparable AAV vector comprising a capsid polypeptide consisting of the amino acid sequence set forth in SEQ ID NO:1. The nucleic acid molecule can be DNA.

[0087] In another aspect, this document features a host cell comprising a nucleic acid molecule of either of the two preceding paragraphs. The host cell can express the vector. The host cell can express the polypeptide.

[0088] In another aspect, this document features a host cell comprising an AAV vector comprising an AAV capsid polypeptide, wherein the capsid polypeptide comprises the amino acid sequence of any one of SEQ ID NOs:F2-F10. The capsid polypeptide can comprise the amino acid sequence of SEQ ID NO:1 (or an alternative sequence that is the amino acid sequence set forth in SEQ ID NO:2206 or that is an amino acid sequence at least 95%, at least 96%, at least 97%, at least 98%, or at least 99% identical to the amino acid sequence set forth in SEQ ID NO:1) except that the amino acid sequence of any one of SEQ ID NOs:F2-F10 is located between amino acid positions 587 and 588 of SEQ ID NO:1 (or the appropriate amino acid positions of the alternative sequence). The capsid polypeptide can comprise the amino acid sequence of SEQ ID NO:1 (or an alternative sequence that is the amino acid sequence set forth in SEQ ID NO:2206 or that is an amino acid sequence at least 95%, at least 96%, at least 97%, at least 98%, or at least 99% identical to the amino acid sequence set forth in SEQ ID NO:1) except that the amino acid sequence of any one of SEQ ID NOs:F2-F5 is located between amino acid positions 587 and 588 of SEQ ID NO:1 (or the appropriate amino acid positions of the alternative sequence). The capsid polypeptide can comprise the amino acid sequence of SEQ ID NO:1 (or an alternative sequence that is the amino acid sequence set forth in SEQ ID NO:2206 or that is an amino acid sequence at least 95%, at least 96%, at least 97%, at least 98%, or at least 99% identical to the amino acid sequence set forth in SEQ ID NO:1) except that the amino acid sequence of any one of SEQ ID NOs:F6-F10 is located between amino acid positions 587 and 588 of SEQ ID NO:1 (or the appropriate amino acid positions of the alternative sequence). The capsid polypeptide can comprise the amino acid sequence of SEQ ID NO:1 (or an alternative sequence that is the amino acid sequence set forth in SEQ ID NO:2206 or that is an amino acid sequence at least 95%, at least 96%, at least 97%, at least 98%, or at least 99% identical to the amino acid sequence set forth in SEQ ID NO:1) except that the amino acids from position 585 to 590 of SEQ ID NO:1 are replaced with the amino acid sequence of any one of SEQ ID NOs:F2-F10. The vector can be an AAV2 vector. The vector can infect greater than 2 percent of RPE cells when a titer of at least 1×10⁷ of the vector is administered intravitreally to an eye of a human (or a non-human primate). The vector can comprise an exogenous nucleic acid encoding an RNA or a polypeptide. The exogenous nucleic acid can encode an RNA. The RNA can be an siRNA or microRNA. The exogenous nucleic acid can encode a polypeptide. The polypeptide can be an ABCA4 polypeptide, a CRB1 polypeptide, an NPHP5 polypeptide, or an NR2E3 polypeptide. The vector can express more nucleic acid in RPE cells than the level of expression from a comparable AAV vector comprising a capsid polypeptide consisting of the amino acid sequence set forth in SEQ ID NO:1. The host cell can be a retinal cell.

[0089] In another aspect, this document features a host cell comprising an AAV capsid polypeptide comprising the amino acid sequence of any one of SEQ ID NOs:F2-F10. The capsid polypeptide can comprise the amino acid sequence of SEQ ID NO:1 (or an alternative sequence that is the amino acid sequence set forth in SEQ ID NO:2206 or that is an amino acid sequence at least 95%, at least 96%, at least 97%, at least 98%, or at least 99% identical to the amino acid sequence set forth in SEQ ID NO:1) except that the amino acid sequence of any one of SEQ ID NOs:F2-F10 is located between amino acid positions 587 and 588 of SEQ ID NO:1 (or the appropriate amino acid positions of the alternative sequence). The capsid polypeptide can comprise the amino acid sequence of SEQ ID NO:1 (or an alternative sequence that is the amino acid sequence set forth in SEQ ID NO:2206 or that is an amino acid sequence at least 95%, at least 96%, at least 97%, at least 98%, or at least 99% identical to the amino acid sequence set forth in SEQ ID NO:1) except that the amino acid sequence of any one of SEQ ID NOs:F2-F5 is located between amino acid positions 587 and 588 of SEQ ID NO:1 (or the appropriate amino acid positions of the alternative sequence). The capsid polypeptide can comprise the amino acid sequence of SEQ ID NO:1 (or an alternative sequence that is the amino acid sequence set forth in SEQ ID NO:2206 or that is an amino acid sequence at least 95%, at least 96%, at least 97%, at least 98%, or at least 99% identical to the amino acid sequence set forth in SEQ ID NO:1) except that the amino acid sequence of any one of SEQ ID NOs:F6-F10 is located between amino acid positions 587 and 588 of SEQ ID NO:1 (or the appropriate amino acid positions of the alternative sequence). The capsid polypeptide can comprise the amino acid sequence of SEQ ID NO:1 (or an alternative sequence that is the amino acid sequence set forth in SEQ ID NO:2206 or that is an amino acid sequence at least 95%, at least 96%, at least 97%, at least 98%, or at least 99% identical to the amino acid sequence set forth in SEQ ID NO:1) except that the amino acids from position 585 to 590 of SEQ ID NO:1 are replaced with the amino acid sequence of any one of SEQ ID NOs:F2-F10. An AAV vector comprising the polypeptide can infect greater than 2 percent of RPE cells when a titer of at least 1×10⁷ of the vector is administered intravitreally to an eye of a human (or a non-human primate). An AAV vector comprising the polypeptide can express more nucleic acid in RPE cells than the level of expression from a comparable AAV vector comprising a capsid polypeptide consisting of the amino acid sequence set forth in SEQ ID NO:1. The host cell can be a retinal cell.

[0090] In another aspect, this document features a composition comprising an AAV vector comprising an AAV capsid polypeptide, wherein the capsid polypeptide comprises the amino acid sequence of any one of SEQ ID NOs:F2-F10. The capsid polypeptide can comprise the amino acid sequence of SEQ ID NO:1 (or an alternative sequence that is the amino acid sequence set forth in SEQ ID NO:2206 or that is an amino acid sequence at least 95%, at least 96%, at least 97%, at least 98%, or at least 99% identical to the amino acid sequence set forth in SEQ ID NO:1) except that the amino acid sequence of any one of SEQ ID NOs:F2-F10 is located between amino acid positions 587 and 588 of SEQ ID NO:1 (or the appropriate amino acid positions of the alternative sequence). The capsid polypeptide can comprise the amino acid sequence of SEQ ID NO:1 (or an alternative sequence that is the amino acid sequence set forth in SEQ ID NO:2206 or that is an amino acid sequence at least 95%, at least 96%, at least 97%, at least 98%, or at least 99% identical to the amino acid sequence set forth in SEQ ID NO:1) except that the amino acid sequence of any one of SEQ ID NOs:F2-F5 is located between amino acid positions 587 and 588 of SEQ ID NO:1 (or the appropriate amino acid positions of the alternative sequence). The capsid polypeptide can comprise the amino acid sequence of SEQ ID NO:1 (or an alternative sequence that is the amino acid sequence set forth in SEQ ID NO:2206 or that is an amino acid sequence at least 95%, at least 96%, at least 97%, at least 98%, or at least 99% identical to the amino acid sequence set forth in SEQ ID NO:1) except that the amino acid sequence of any one of SEQ ID NOs:F6-F10 is located between amino acid positions 587 and 588 of SEQ ID NO:1 (or the appropriate amino acid positions of the alternative sequence). The capsid polypeptide can comprise the amino acid sequence of SEQ ID NO:1 (or an alternative sequence that is the amino acid sequence set forth in SEQ ID NO:2206 or that is an amino acid sequence at least 95%, at least 96%, at least 97%, at least 98%, or at least 99% identical to the amino acid sequence set forth in SEQ ID NO:1) except that the amino acids from position 585 to 590 of SEQ ID NO:1 are replaced with the amino acid sequence of any one of SEQ ID NOs:F2-F10. The vector can be an AAV2 vector. The vector can infect greater than 2 percent of RPE cells when a titer of at least 1×10⁷ of the vector is administered intravitreally to an eye of a human (or a non-human primate). The vector can comprise an exogenous nucleic acid encoding an RNA or a polypeptide. The exogenous nucleic acid can encode an RNA. The RNA can be an siRNA or microRNA. The exogenous nucleic acid can encode a polypeptide. The polypeptide can be an ABCA4 polypeptide, a CRB1 polypeptide, an NPHP5 polypeptide, or an NR2E3 polypeptide. The vector can express more nucleic acid in RPE cells than the level of expression from a comparable AAV vector comprising a capsid polypeptide consisting of the amino acid sequence set forth in SEQ ID NO:1. The composition can comprise from about 1×10⁷ to about 1×10¹⁴ of the vector. The composition can comprise phosphate buffered saline, Hank's Balanced Salt Solution, or Pluronic F68.

[0091] In another aspect, this document features a method for delivering an exogenous nucleic acid sequence to RPE cells of an eye of a mammal. The method comprises (or consists essentially of, or consists of) contacting the RPE cells with an AAV vector comprising an AAV capsid polypeptide and the exogenous nucleic acid sequence, wherein the capsid polypeptide comprises the amino acid sequence of any one of SEQ ID NOs:F2-F10, wherein the AAV vector infects RPE cells, thereby delivering the exogenous nucleic acid sequence to the RPE cells. The capsid polypeptide can comprise the amino acid sequence of SEQ ID NO:1 (or an alternative sequence that is the amino acid sequence set forth in SEQ ID NO:2206 or that is an amino acid sequence at least 95%, at least 96%, at least 97%, at least 98%, or at least 99% identical to the amino acid sequence set forth in SEQ ID NO:1) except that the amino acid sequence of any one of SEQ ID NOs:F2-F10 is located between amino acid positions 587 and 588 of SEQ ID NO:1 (or the appropriate amino acid positions of the alternative sequence). The capsid polypeptide can comprise the amino acid sequence of SEQ ID NO:1 (or an alternative sequence that is the amino acid sequence set forth in SEQ ID NO:2206 or that is an amino acid sequence at least 95%, at least 96%, at least 97%, at least 98%, or at least 99% identical to the amino acid sequence set forth in SEQ ID NO:1) except that the amino acid sequence of any one of SEQ ID NOs:F2-F5 is located between amino acid positions 587 and 588 of SEQ ID NO:1 (or the appropriate amino acid positions of the alternative sequence). The capsid polypeptide can comprise the amino acid sequence of SEQ ID NO:1 (or an alternative sequence that is the amino acid sequence set forth in SEQ ID NO:2206 or that is an amino acid sequence at least 95%, at least 96%, at least 97%, at least 98%, or at least 99% identical to the amino acid sequence set forth in SEQ ID NO:1) except that the amino acid sequence of any one of SEQ ID NOs:F6-F10 is located between amino acid positions 587 and 588 of SEQ ID NO:1 (or the appropriate amino acid positions of the alternative sequence). The capsid polypeptide can comprise the amino acid sequence of SEQ ID NO:1 (or an alternative sequence that is the amino acid sequence set forth in SEQ ID NO:2206 or that is an amino acid sequence at least 95%, at least 96%, at least 97%, at least 98%, or at least 99% identical to the amino acid sequence set forth in SEQ ID NO:1) except that the amino acids from position 585 to 590 of SEQ ID NO:1 are replaced with the amino acid sequence of any one of SEQ ID NOs:F2-F10. The mammal can be a human (or a non-human primate). The vector can be an AAV2 vector. The vector can infect greater than 2 percent of RPE cells of an eye when a titer of at least 1×10⁷ of the vector is administered intravitreally to the eye. The exogenous nucleic acid sequence can encode an RNA or a polypeptide. The exogenous nucleic acid can encode an RNA. The RNA can be an siRNA or microRNA. The exogenous nucleic acid can encode a polypeptide. The polypeptide can be an ABCA4 polypeptide, a CRB1 polypeptide, an NPHP5 polypeptide, or an NR2E3 polypeptide. The vector can express more of the exogenous nucleic acid sequence in the RPE cells than the level of expression in a RPE cell from a comparable AAV vector comprising a capsid polypeptide consisting of the amino acid sequence set forth in SEQ ID NO:1. The method can comprise intravitreally administering a composition comprising the vector to the mammal, thereby contacting the RPE cells with the vector. The composition can comprise from about 1×10⁷ to about 1×10¹⁴ of the vector.

[0092] In another aspect, this document features a method for treating a retinal condition. The method comprises (or consists essentially of, or consists of) contacting RPE cells of an eye of a mammal having the retinal condition with AAV vectors comprising an AAV capsid polypeptide and an exogenous nucleic acid sequence, wherein the capsid polypeptide comprises the amino acid sequence of any one of SEQ ID NOs:F2-F10, wherein the AAV vectors infect the RPE cells and drive expression of the exogenous nucleic acid sequence within the RPE cells, thereby treating the retinal condition. The mammal can be a human (or a non-human primate). The retinal condition can be selected from the group consisting of cone dystrophy, cone/rod dystrophy, retinitis pigmentosa, macular degeneration, achromatopsia, blue cone monochromcy, and color blindness. The capsid polypeptide can comprise the amino acid sequence of SEQ ID NO:1 (or an alternative sequence that is the amino acid sequence set forth in SEQ ID NO:2206 or that is an amino acid sequence at least 95%, at least 96%, at least 97%, at least 98%, or at least 99% identical to the amino acid sequence set forth in SEQ ID NO:1) except that the amino acid sequence of any one of SEQ ID NOs:F2-F10 is located between amino acid positions 587 and 588 of SEQ ID NO:1 (or the appropriate amino acid positions of the alternative sequence). The capsid polypeptide can comprise the amino acid sequence of SEQ ID NO:1 (or an alternative sequence that is the amino acid sequence set forth in SEQ ID NO:2206 or that is an amino acid sequence at least 95%, at least 96%, at least 97%, at least 98%, or at least 99% identical to the amino acid sequence set forth in SEQ ID NO:1) except that the amino acid sequence of any one of SEQ ID NOs:F2-F5 is located between amino acid positions 587 and 588 of SEQ ID NO:1 (or the appropriate amino acid positions of the alternative sequence). The capsid polypeptide can comprise the amino acid sequence of SEQ ID NO:1 (or an alternative sequence that is the amino acid sequence set forth in SEQ ID NO:2206 or that is an amino acid sequence at least 95%, at least 96%, at least 97%, at least 98%, or at least 99% identical to the amino acid sequence set forth in SEQ ID NO:1) except that the amino acid sequence of any one of SEQ ID NOs:F6-F10 is located between amino acid positions 587 and 588 of SEQ ID NO:1 (or the appropriate amino acid positions of the alternative sequence). The capsid polypeptide can comprise the amino acid sequence of SEQ ID NO:1 (or an alternative sequence that is the amino acid sequence set forth in SEQ ID NO:2206 or that is an amino acid sequence at least 95%, at least 96%, at least 97%, at least 98%, or at least 99% identical to the amino acid sequence set forth in SEQ ID NO:1) except that the amino acids from position 585 to 590 of SEQ ID NO:1 are replaced with the amino acid sequence of any one of SEQ ID NOs:F2-F10. The vectors can be AAV2 vectors. The vectors can infect greater than 2 percent of RPE cells when a titer of at least 1×10⁷ of the vectors is administered intravitreally to an eye of the mammal. The exogenous nucleic acid sequence can encode an RNA. The RNA can be an siRNA or microRNA. The exogenous nucleic acid can encode a polypeptide. The polypeptide can be an ABCA4 polypeptide, a CRB1 polypeptide, an NPHP5 polypeptide, or an NR2E3 polypeptide. The vectors can express more of the exogenous nucleic acid sequence in the RPE cells than the level of expression in RPE cells from a comparable AAV vector comprising a capsid polypeptide consisting of the amino acid sequence set forth in SEQ ID NO:1. The method can comprise intravitreally administering a composition comprising the vectors to the mammal, thereby contacting the RPE cells with the vectors. The composition can comprise from about 1×10⁷ to about 1×10¹⁴ of the vector.

[0093] In another aspect, this document features an adeno-associated virus (AAV) vector comprising an AAV capsid polypeptide, wherein the capsid polypeptide comprises the amino acid sequence of any one of SEQ ID NOs:G2-G77. The capsid polypeptide can comprise the amino acid sequence of SEQ ID NO:1 (or an alternative sequence that is the amino acid sequence set forth in SEQ ID NO:2206 or that is an amino acid sequence at least 95%, at least 96%, at least 97%, at least 98%, or at least 99% identical to the amino acid sequence set forth in SEQ ID NO:1) except that the amino acid sequence of any one of SEQ ID NOs:G2-G77 is located between amino acid positions 587 and 588 of SEQ ID NO:1 (or the appropriate amino acid positions of the alternative sequence). The capsid polypeptide can comprise the amino acid sequence of SEQ ID NO:1 (or an alternative sequence that is the amino acid sequence set forth in SEQ ID NO:2206 or that is an amino acid sequence at least 95%, at least 96%, at least 97%, at least 98%, or at least 99% identical to the amino acid sequence set forth in SEQ ID NO:1) except that the amino acid sequence of any one of SEQ ID NOs:G2-G70 is located between amino acid positions 587 and 588 of SEQ ID NO:1 (or the appropriate amino acid positions of the alternative sequence). The capsid polypeptide can comprise the amino acid sequence of SEQ ID NO:1 (or an alternative sequence that is the amino acid sequence set forth in SEQ ID NO:2206 or that is an amino acid sequence at least 95%, at least 96%, at least 97%, at least 98%, or at least 99% identical to the amino acid sequence set forth in SEQ ID NO:1) except that the amino acids from position 585 to 590 of SEQ ID NO:1 are replaced with the amino acid sequence of any one of SEQ ID NOs:G2-G77. The capsid polypeptide can comprise the amino acid sequence of SEQ ID NO:1 (or an alternative sequence that is the amino acid sequence set forth in SEQ ID NO:2206 or that is an amino acid sequence at least 95%, at least 96%, at least 97%, at least 98%, or at least 99% identical to the amino acid sequence set forth in SEQ ID NO:1) except that the amino acids from position 585 to 590 of SEQ ID NO:1 are replaced with the amino acid sequence of any one of SEQ ID NOs:G71-G77. The vector can be an AAV2 vector. The vector can infect greater than 2 percent of photoreceptor cells of an eye when a titer of at least 1×10⁷ of the vector is administered intravitreally to the eye. The vector can comprise an exogenous nucleic acid encoding an RNA or a polypeptide. The exogenous nucleic acid can encode an RNA. The RNA can be an siRNA or microRNA. The exogenous nucleic acid can encode a polypeptide. The polypeptide can be an ABCA4 polypeptide, a CRB1 polypeptide, an NPHP5 polypeptide, or an NR2E3 polypeptide. The vector can express more nucleic acid in photoreceptor cells than the level of expression from a comparable AAV vector comprising a capsid polypeptide consisting of the amino acid sequence set forth in SEQ ID NO:1.

[0094] In another aspect, this document features an AAV capsid polypeptide comprising the amino acid sequence of any one of SEQ ID NOs:G2-G77. The polypeptide can comprise the amino acid sequence of SEQ ID NO:1 (or an alternative sequence that is the amino acid sequence set forth in SEQ ID NO:2206 or that is an amino acid sequence at least 95%, at least 96%, at least 97%, at least 98%, or at least 99% identical to the amino acid sequence set forth in SEQ ID NO:1) except that the amino acid sequence of any one of SEQ ID NOs:G2-G77 is located between amino acid positions 587 and 588 of SEQ ID NO:1 (or the appropriate amino acid positions of the alternative sequence). The polypeptide can comprise the amino acid sequence of SEQ ID NO:1 (or an alternative sequence that is the amino acid sequence set forth in SEQ ID NO:2206 or that is an amino acid sequence at least 95%, at least 96%, at least 97%, at least 98%, or at least 99% identical to the amino acid sequence set forth in SEQ ID NO:1) except that the amino acid sequence of any one of SEQ ID NOs:G2-G70 is located between amino acid positions 587 and 588 of SEQ ID NO:1 (or the appropriate amino acid positions of the alternative sequence). The polypeptide can comprise the amino acid sequence of SEQ ID NO:1 (or an alternative sequence that is the amino acid sequence set forth in SEQ ID NO:2206 or that is an amino acid sequence at least 95%, at least 96%, at least 97%, at least 98%, or at least 99% identical to the amino acid sequence set forth in SEQ ID NO: 1) except that the amino acids from position 585 to 590 of SEQ ID NO:1 are replaced with the amino acid sequence of any one of SEQ ID NOs:G2-G77. The polypeptide can comprise the amino acid sequence of SEQ ID NO:1 (or an alternative sequence that is the amino acid sequence set forth in SEQ ID NO:2206 or that is an amino acid sequence at least 95%, at least 96%, at least 97%, at least 98%, or at least 99% identical to the amino acid sequence set forth in SEQ ID NO: 1) except that the amino acids from position 585 to 590 of SEQ ID NO:1 are replaced with the amino acid sequence of any one of SEQ ID NOs:G71-G77. An AAV vector comprising the polypeptide can infect greater than 2 percent of photoreceptor cells of an eye when a titer of at least 1×10¹ of the vector is administered intravitreally to the eye. An AAV vector comprising the polypeptide can express more nucleic acid in photoreceptor cells than the level of expression from a comparable AAV vector comprising a capsid polypeptide consisting of the amino acid sequence set forth in SEQ ID NO:1.

[0095] In another aspect, this document features a nucleic acid molecule encoding an AAV vector comprising an AAV capsid polypeptide, wherein the capsid polypeptide comprises the amino acid sequence of any one of SEQ ID NOs:G2-G77. The capsid polypeptide can comprise the amino acid sequence of SEQ ID NO:1 (or an alternative sequence that is the amino acid sequence set forth in SEQ ID NO:2206 or that is an amino acid sequence at least 95%, at least 96%, at least 97%, at least 98%, or at least 99% identical to the amino acid sequence set forth in SEQ ID NO:1) except that the amino acid sequence of any one of SEQ ID NOs:G2-G77 is located between amino acid positions 587 and 588 of SEQ ID NO:1 (or the appropriate amino acid positions of the alternative sequence). The capsid polypeptide can comprise the amino acid sequence of SEQ ID NO:1 (or an alternative sequence that is the amino acid sequence set forth in SEQ ID NO:2206 or that is an amino acid sequence at least 95%, at least 96%, at least 97%, at least 98%, or at least 99% identical to the amino acid sequence set forth in SEQ ID NO:1) except that the amino acid sequence of any one of SEQ ID NOs:G2-G70 is located between amino acid positions 587 and 588 of SEQ ID NO:1 (or the appropriate amino acid positions of the alternative sequence). The capsid polypeptide can comprise the amino acid sequence of SEQ ID NO:1 (or an alternative sequence that is the amino acid sequence set forth in SEQ ID NO:2206 or that is an amino acid sequence at least 95%, at least 96%, at least 97%, at least 98%, or at least 99% identical to the amino acid sequence set forth in SEQ ID NO:1) except that the amino acids from position 585 to 590 of SEQ ID NO:1 are replaced with the amino acid sequence of any one of SEQ ID NOs:G2-G77. The capsid polypeptide can comprise the amino acid sequence of SEQ ID NO:1 (or an alternative sequence that is the amino acid sequence set forth in SEQ ID NO:2206 or that is an amino acid sequence at least 95%, at least 96%, at least 97%, at least 98%, or at least 99% identical to the amino acid sequence set forth in SEQ ID NO:1) except that the amino acids from position 585 to 590 of SEQ ID NO:1 are replaced with the amino acid sequence of any one of SEQ ID NOs:G71-G77. The vector can be an AAV2 vector. The vector can infect greater than 2 percent of photoreceptor cells of an eye when a titer of at least 1×10⁷ of the vector is administered intravitreally to the eye. The vector can comprise an exogenous nucleic acid encoding an RNA or a polypeptide. The exogenous nucleic acid can encode an RNA. The RNA can be an siRNA or microRNA. The exogenous nucleic acid can encode a polypeptide. The polypeptide can be an ABCA4 polypeptide, a CRB1 polypeptide, an NPHP5 polypeptide, or an NR2E3 polypeptide. The vector can express more nucleic acid in photoreceptor cells than the level of expression from a comparable AAV vector comprising a capsid polypeptide consisting of the amino acid sequence set forth in SEQ ID NO:1. The nucleic acid molecule can be DNA.

[0096] In another aspect, this document features a nucleic acid molecule encoding an AAV capsid polypeptide comprising the amino acid sequence of any one of SEQ ID NOs:G2-G77. The polypeptide can comprise the amino acid sequence of SEQ ID NO:1 (or an alternative sequence that is the amino acid sequence set forth in SEQ ID NO:2206 or that is an amino acid sequence at least 95%, at least 96%, at least 97%, at least 98%, or at least 99% identical to the amino acid sequence set forth in SEQ ID NO:1) except that the amino acid sequence of any one of SEQ ID NOs:G2-G77 is located between amino acid positions 587 and 588 of SEQ ID NO:1 (or the appropriate amino acid positions of the alternative sequence). The polypeptide can comprise the amino acid sequence of SEQ ID NO:1 (or an alternative sequence that is the amino acid sequence set forth in SEQ ID NO:2206 or that is an amino acid sequence at least 95%, at least 96%, at least 97%, at least 98%, or at least 99% identical to the amino acid sequence set forth in SEQ ID NO:1) except that the amino acid sequence of any one of SEQ ID NOs:G2-G70 is located between amino acid positions 587 and 588 of SEQ ID NO:1 (or the appropriate amino acid positions of the alternative sequence). The polypeptide can comprise the amino acid sequence of SEQ ID NO:1 (or an alternative sequence that is the amino acid sequence set forth in SEQ ID NO:2206 or that is an amino acid sequence at least 95%, at least 96%, at least 97%, at least 98%, or at least 99% identical to the amino acid sequence set forth in SEQ ID NO:1) except that the amino acids from position 585 to 590 of SEQ ID NO:1 are replaced with the amino acid sequence of any one of SEQ ID NOs:G2-G77. The polypeptide can comprise the amino acid sequence of SEQ ID NO:1 (or an alternative sequence that is the amino acid sequence set forth in SEQ ID NO:2206 or that is an amino acid sequence at least 95%, at least 96%, at least 97%, at least 98%, or at least 99% identical to the amino acid sequence set forth in SEQ ID NO:1) except that the amino acids from position 585 to 590 of SEQ ID NO:1 are replaced with the amino acid sequence of any one of SEQ ID NOs:G71-G77. An AAV vector comprising the polypeptide can infect greater than 2 percent of photoreceptor cells of an eye when a titer of at least 1×10⁷ of the vector is administered intravitreally to the eye. An AAV vector comprising the polypeptide can express more nucleic acid in photoreceptor cells than the level of expression from a comparable AAV vector comprising a capsid polypeptide consisting of the amino acid sequence set forth in SEQ ID NO:1. The nucleic acid molecule can be DNA.

[0097] In another aspect, this document features a host cell comprising a nucleic acid molecule of either of the two preceding paragraphs. The host cell can express the vector. The host cell can express the polypeptide.

[0098] In another aspect, this document features a host cell comprising an AAV vector comprising an AAV capsid polypeptide, wherein the capsid polypeptide comprises the amino acid sequence of any one of SEQ ID NOs:G2-G77. The capsid polypeptide can comprise the amino acid sequence of SEQ ID NO:1 (or an alternative sequence that is the amino acid sequence set forth in SEQ ID NO:2206 or that is an amino acid sequence at least 95%, at least 96%, at least 97%, at least 98%, or at least 99% identical to the amino acid sequence set forth in SEQ ID NO:1) except that the amino acid sequence of any one of SEQ ID NOs:G2-G77 is located between amino acid positions 587 and 588 of SEQ ID NO:1 (or the appropriate amino acid positions of the alternative sequence). The capsid polypeptide can comprise the amino acid sequence of SEQ ID NO:1 (or an alternative sequence that is the amino acid sequence set forth in SEQ ID NO:2206 or that is an amino acid sequence at least 95%, at least 96%, at least 97%, at least 98%, or at least 99% identical to the amino acid sequence set forth in SEQ ID NO:1) except that the amino acid sequence of any one of SEQ ID NOs:G2-G70 is located between amino acid positions 587 and 588 of SEQ ID NO:1 (or the appropriate amino acid positions of the alternative sequence). The capsid polypeptide can comprise the amino acid sequence of SEQ ID NO:1 (or an alternative sequence that is the amino acid sequence set forth in SEQ ID NO:2206 or that is an amino acid sequence at least 95%, at least 96%, at least 97%, at least 98%, or at least 99% identical to the amino acid sequence set forth in SEQ ID NO:1) except that the amino acids from position 585 to 590 of SEQ ID NO:1 are replaced with the amino acid sequence of any one of SEQ ID NOs:G2-G77. The capsid polypeptide can comprise the amino acid sequence of SEQ ID NO:1 (or an alternative sequence that is the amino acid sequence set forth in SEQ ID NO:2206 or that is an amino acid sequence at least 95%, at least 96%, at least 97%, at least 98%, or at least 99% identical to the amino acid sequence set forth in SEQ ID NO:1) except that the amino acids from position 585 to 590 of SEQ ID NO:1 are replaced with the amino acid sequence of any one of SEQ ID NOs:G71-G77. The vector can be an AAV2 vector. The vector can infect greater than 2 percent of photoreceptor cells of an eye when a titer of at least 1×10⁷ of the vector is administered intravitreally to the eye. The vector can comprise an exogenous nucleic acid encoding an RNA or a polypeptide. The exogenous nucleic acid can encode an RNA. The RNA can be an siRNA or microRNA. The exogenous nucleic acid can encode a polypeptide. The polypeptide can be an ABCA4 polypeptide, a CRB1 polypeptide, an NPHP5 polypeptide, or an NR2E3 polypeptide. The vector can express more nucleic acid in photoreceptor cells than the level of expression from a comparable AAV vector comprising a capsid polypeptide consisting of the amino acid sequence set forth in SEQ ID NO:1. The host cell can be a retinal cell.

[0099] In another aspect, this document features a host cell comprising an AAV capsid polypeptide comprising the amino acid sequence of any one of SEQ ID NOs:G2-G77. The polypeptide can comprise the amino acid sequence of SEQ ID NO:1 (or an alternative sequence that is the amino acid sequence set forth in SEQ ID NO:2206 or that is an amino acid sequence at least 95%, at least 96%, at least 97%, at least 98%, or at least 99% identical to the amino acid sequence set forth in SEQ ID NO:1) except that the amino acid sequence of any one of SEQ ID NOs:G2-G77 is located between amino acid positions 587 and 588 of SEQ ID NO:1 (or the appropriate amino acid positions of the alternative sequence). The polypeptide can comprise the amino acid sequence of SEQ ID NO:1 (or an alternative sequence that is the amino acid sequence set forth in SEQ ID NO:2206 or that is an amino acid sequence at least 95%, at least 96%, at least 97%, at least 98%, or at least 99% identical to the amino acid sequence set forth in SEQ ID NO:1) except that the amino acid sequence of any one of SEQ ID NOs:G2-G70 is located between amino acid positions 587 and 588 of SEQ ID NO:1 (or the appropriate amino acid positions of the alternative sequence). The polypeptide can comprise the amino acid sequence of SEQ ID NO:1 (or an alternative sequence that is the amino acid sequence set forth in SEQ ID NO:2206 or that is an amino acid sequence at least 95%, at least 96%, at least 97%, at least 98%, or at least 99% identical to the amino acid sequence set forth in SEQ ID NO:1) except that the amino acids from position 585 to 590 of SEQ ID NO:1 are replaced with the amino acid sequence of any one of SEQ ID NOs:G2-G77. The polypeptide can comprise the amino acid sequence of SEQ ID NO:1 (or an alternative sequence that is the amino acid sequence set forth in SEQ ID NO:2206 or that is an amino acid sequence at least 95%, at least 96%, at least 97%, at least 98%, or at least 99% identical to the amino acid sequence set forth in SEQ ID NO:1) except that the amino acids from position 585 to 590 of SEQ ID NO:1 are replaced with the amino acid sequence of any one of SEQ ID NOs:G71-G77. An AAV vector comprising the polypeptide can infect greater than 2 percent of photoreceptor cells of an eye when a titer of at least 1×10⁷ of the vector is administered intravitreally to the eye. An AAV vector comprising the polypeptide can express more nucleic acid in photoreceptor cells than the level of expression from a comparable AAV vector comprising a capsid polypeptide consisting of the amino acid sequence set forth in SEQ ID NO:1. The host cell can be a retinal cell.

[0100] In another aspect, this document features a composition comprising an AAV vector comprising an AAV capsid polypeptide, wherein the capsid polypeptide comprises the amino acid sequence of any one of SEQ ID NOs:G2-G77. The capsid polypeptide can comprise the amino acid sequence of SEQ ID NO:1 (or an alternative sequence that is the amino acid sequence set forth in SEQ ID NO:2206 or that is an amino acid sequence at least 95%, at least 96%, at least 97%, at least 98%, or at least 99% identical to the amino acid sequence set forth in SEQ ID NO:1) except that the amino acid sequence of any one of SEQ ID NOs:G2-G77 is located between amino acid positions 587 and 588 of SEQ ID NO:1 (or the appropriate amino acid positions of the alternative sequence). The capsid polypeptide can comprise the amino acid sequence of SEQ ID NO:1 (or an alternative sequence that is the amino acid sequence set forth in SEQ ID NO:2206 or that is an amino acid sequence at least 95%, at least 96%, at least 97%, at least 98%, or at least 99% identical to the amino acid sequence set forth in SEQ ID NO: 1) except that the amino acid sequence of any one of SEQ ID NOs:G2-G70 is located between amino acid positions 587 and 588 of SEQ ID NO:1 (or the appropriate amino acid positions of the alternative sequence). The capsid polypeptide can comprise the amino acid sequence of SEQ ID NO:1 (or an alternative sequence that is the amino acid sequence set forth in SEQ ID NO:2206 or that is an amino acid sequence at least 95%, at least 96%, at least 97%, at least 98%, or at least 99% identical to the amino acid sequence set forth in SEQ ID NO:1) except that the amino acids from position 585 to 590 of SEQ ID NO:1 are replaced with the amino acid sequence of any one of SEQ ID NOs:G2-G77. The capsid polypeptide can comprise the amino acid sequence of SEQ ID NO:1 (or an alternative sequence that is the amino acid sequence set forth in SEQ ID NO:2206 or that is an amino acid sequence at least 95%, at least 96%, at least 97%, at least 98%, or at least 99% identical to the amino acid sequence set forth in SEQ ID NO:1) except that the amino acids from position 585 to 590 of SEQ ID NO:1 are replaced with the amino acid sequence of any one of SEQ ID NOs:G71-G77. The vector can be an AAV2 vector. The vector can infect greater than 2 percent of photoreceptor cells of an eye when a titer of at least 1×10⁷ of the vector is administered intravitreally to the eye. The vector can comprise an exogenous nucleic acid encoding an RNA or a polypeptide. The exogenous nucleic acid can encode an RNA. The RNA can be an siRNA or microRNA. The exogenous nucleic acid can encode a polypeptide. The polypeptide can be an ABCA4 polypeptide, a CRB1 polypeptide, an NPHP5 polypeptide, or an NR2E3 polypeptide. The vector can express more nucleic acid in photoreceptor cells than the level of expression from a comparable AAV vector comprising a capsid polypeptide consisting of the amino acid sequence set forth in SEQ ID NO:1. The composition can comprise from about 1×10⁷ to about 1×10¹⁴ of the vector. The composition can comprise phosphate buffered saline, Hank's Balanced Salt Solution, or Pluronic F68.

[0101] In another aspect, this document features a method for delivering an exogenous nucleic acid sequence to a photoreceptor cell within a mammal. The method comprises (or consists essentially of, or consists of) contacting the photoreceptor cell with an AAV vector comprising an AAV capsid polypeptide and the exogenous nucleic acid sequence, wherein the capsid polypeptide comprises the amino acid sequence of any one of SEQ ID NOs:G2-G77, wherein the AAV vector infects the photoreceptor cell, thereby delivering the exogenous nucleic acid sequence to the photoreceptor cell. The capsid polypeptide can comprise the amino acid sequence of SEQ ID NO:1 (or an alternative sequence that is the amino acid sequence set forth in SEQ ID NO:2206 or that is an amino acid sequence at least 95%, at least 96%, at least 97%, at least 98%, or at least 99% identical to the amino acid sequence set forth in SEQ ID NO:1) except that the amino acid sequence of any one of SEQ ID NOs:G2-G77 is located between amino acid positions 587 and 588 of SEQ ID NO:1 (or the appropriate amino acid positions of the alternative sequence). The capsid polypeptide can comprise the amino acid sequence of SEQ ID NO:1 (or an alternative sequence that is the amino acid sequence set forth in SEQ ID NO:2206 or that is an amino acid sequence at least 95%, at least 96%, at least 97%, at least 98%, or at least 99% identical to the amino acid sequence set forth in SEQ ID NO:1) except that the amino acid sequence of any one of SEQ ID NOs:G2-G70 is located between amino acid positions 587 and 588 of SEQ ID NO:1 (or the appropriate amino acid positions of the alternative sequence). The capsid polypeptide can comprise the amino acid sequence of SEQ ID NO:1 (or an alternative sequence that is the amino acid sequence set forth in SEQ ID NO:2206 or that is an amino acid sequence at least 95%, at least 96%, at least 97%, at least 98%, or at least 99% identical to the amino acid sequence set forth in SEQ ID NO:1) except that the amino acids from position 585 to 590 of SEQ ID NO:1 are replaced with the amino acid sequence of any one of SEQ ID NOs:G2-G77. The capsid polypeptide can comprise the amino acid sequence of SEQ ID NO:1 (or an alternative sequence that is the amino acid sequence set forth in SEQ ID NO:2206 or that is an amino acid sequence at least 95%, at least 96%, at least 97%, at least 98%, or at least 99% identical to the amino acid sequence set forth in SEQ ID NO: 1) except that the amino acids from position 585 to 590 of SEQ ID NO:1 are replaced with the amino acid sequence of any one of SEQ ID NOs:G71-G77. The mammal can be a human (or a non-human primate). The vector can be an AAV2 vector. The vector can infect greater than 2 percent of photoreceptor cells of an eye when a titer of at least 1×10⁷ of the vector is administered intravitreally to the eye. The exogenous nucleic acid sequence can encode an RNA or a polypeptide. The exogenous nucleic acid can encode an RNA. The RNA can be an siRNA or microRNA. The exogenous nucleic acid can encode a polypeptide. The polypeptide can be an ABCA4 polypeptide, a CRB1 polypeptide, an NPHP5 polypeptide, or an NR2E3 polypeptide. The vector can express more of the exogenous nucleic acid sequence in the photoreceptor cell than the level of expression in a photoreceptor cell from a comparable AAV vector comprising a capsid polypeptide consisting of the amino acid sequence set forth in SEQ ID NO:1. The method can comprise intravitreally administering a composition comprising the vector to the mammal, thereby contacting the photoreceptor cell with the vector. The composition can comprise from about 1×10⁷ to about 1×10¹⁴ of the vector.

[0102] In another aspect, this document features a method for treating a retinal condition. The method comprises (or consists essentially of, or consists of) contacting photoreceptor cells of a mammal having the retinal condition with AAV vectors comprising an AAV capsid polypeptide and an exogenous nucleic acid sequence, wherein the capsid polypeptide comprises the amino acid sequence of any one of SEQ ID NOs:G2-G77, wherein the AAV vectors infect the photoreceptor cells and drive expression of the exogenous nucleic acid sequence within the photoreceptor cells, thereby treating the retinal condition. The mammal can be a human (or a non-human primate). The retinal condition can be selected from the group consisting of cone dystrophy, cone/rod dystrophy, retinitis pigmentosa, macular degeneration, achromatopsia, blue cone monochromcy, and color blindness. The capsid polypeptide can comprise the amino acid sequence of SEQ ID NO:1 (or an alternative sequence that is the amino acid sequence set forth in SEQ ID NO:2206 or that is an amino acid sequence at least 95%, at least 96%, at least 97%, at least 98%, or at least 99% identical to the amino acid sequence set forth in SEQ ID NO:1) except that the amino acid sequence of any one of SEQ ID NOs:G2-G77 is located between amino acid positions 587 and 588 of SEQ ID NO:1 (or the appropriate amino acid positions of the alternative sequence). The capsid polypeptide can comprise the amino acid sequence of SEQ ID NO:1 (or an alternative sequence that is the amino acid sequence set forth in SEQ ID NO:2206 or that is an amino acid sequence at least 95%, at least 96%, at least 97%, at least 98%, or at least 99% identical to the amino acid sequence set forth in SEQ ID NO:1) except that the amino acid sequence of any one of SEQ ID NOs:G2-G70 is located between amino acid positions 587 and 588 of SEQ ID NO:1 (or the appropriate amino acid positions of the alternative sequence). The capsid polypeptide can comprise the amino acid sequence of SEQ ID NO:1 (or an alternative sequence that is the amino acid sequence set forth in SEQ ID NO:2206 or that is an amino acid sequence at least 95%, at least 96%, at least 97%, at least 98%, or at least 99% identical to the amino acid sequence set forth in SEQ ID NO:1) except that the amino acids from position 585 to 590 of SEQ ID NO:1 are replaced with the amino acid sequence of any one of SEQ ID NOs:G2-G77. The capsid polypeptide can comprise the amino acid sequence of SEQ ID NO:1 (or an alternative sequence that is the amino acid sequence set forth in SEQ ID NO:2206 or that is an amino acid sequence at least 95%, at least 96%, at least 97%, at least 98%, or at least 99% identical to the amino acid sequence set forth in SEQ ID NO: 1) except that the amino acids from position 585 to 590 of SEQ ID NO:1 are replaced with the amino acid sequence of any one of SEQ ID NOs:G71-G77. The vectors can be AAV2 vectors. The vectors can infect greater than 2 percent of photoreceptor cells when a titer of at least 1×10⁷ of the vectors is administered intravitreally to an eye of the mammal. The exogenous nucleic acid sequence can encode an RNA. The RNA can be an siRNA or microRNA. The exogenous nucleic acid can encode a polypeptide. The polypeptide can be an ABCA4 polypeptide, a CRB1 polypeptide, an NPHP5 polypeptide, or an NR2E3 polypeptide. The vectors can express more of the exogenous nucleic acid sequence in the photoreceptor cells than the level of expression in photoreceptor cells from a comparable AAV vector comprising a capsid polypeptide consisting of the amino acid sequence set forth in SEQ ID NO:1. The method can comprise intravitreally administering a composition comprising the vectors to the mammal, thereby contacting the photoreceptor cells with the vectors. The composition can comprise from about 1×10⁷ to about 1×10¹⁴ of the vector.

[0103] In another aspect, this document features an adeno-associated virus (AAV) vector comprising an AAV capsid polypeptide, wherein the capsid polypeptide comprises the amino acid sequence of any one of SEQ ID NOs:H2-H258. The capsid polypeptide can comprise the amino acid sequence of SEQ ID NO:1 (or an alternative sequence that is the amino acid sequence set forth in SEQ ID NO:2206 or that is an amino acid sequence at least 95%, at least 96%, at least 97%, at least 98%, or at least 99% identical to the amino acid sequence set forth in SEQ ID NO:1) except that the amino acid sequence of any one of SEQ ID NOs:H2-H258 is located between amino acid positions 587 and 588 of SEQ ID NO:1 (or the appropriate amino acid positions of the alternative sequence). The capsid polypeptide can comprise the amino acid sequence of SEQ ID NO:1 (or an alternative sequence that is the amino acid sequence set forth in SEQ ID NO:2206 or that is an amino acid sequence at least 95%, at least 96%, at least 97%, at least 98%, or at least 99% identical to the amino acid sequence set forth in SEQ ID NO:1) except that the amino acid sequence of any one of SEQ ID NOs:H2-H243 is located between amino acid positions 587 and 588 of SEQ ID NO:1 (or the appropriate amino acid positions of the alternative sequence). The capsid polypeptide can comprise the amino acid sequence of SEQ ID NO:1 (or an alternative sequence that is the amino acid sequence set forth in SEQ ID NO:2206 or that is an amino acid sequence at least 95%, at least 96%, at least 97%, at least 98%, or at least 99% identical to the amino acid sequence set forth in SEQ ID NO:1) except that the amino acids from position 585 to 590 of SEQ ID NO:1 are replaced with the amino acid sequence of any one of SEQ ID NOs:H2-H258. The capsid polypeptide can comprise the amino acid sequence of SEQ ID NO:1 (or an alternative sequence that is the amino acid sequence set forth in SEQ ID NO:2206 or that is an amino acid sequence at least 95%, at least 96%, at least 97%, at least 98%, or at least 99% identical to the amino acid sequence set forth in SEQ ID NO:1) except that the amino acids from position 585 to 590 of SEQ ID NO:1 are replaced with the amino acid sequence of any one of SEQ ID NOs:H244-H258. The vector can be an AAV2 vector. The vector can infect greater than 2 percent of retinal ganglion cells of an eye when a titer of at least 1×10⁷ of the vector is administered intravitreally to the eye. The vector can comprise an exogenous nucleic acid encoding an RNA or a polypeptide. The exogenous nucleic acid can encode an RNA. The RNA can be an siRNA or microRNA. The exogenous nucleic acid can encode a polypeptide. The polypeptide can be an ABCA4 polypeptide, a CRB1 polypeptide, an NPHP5 polypeptide, or an NR2E3 polypeptide. The vector can express more nucleic acid in retinal ganglion cells than the level of expression from a comparable AAV vector comprising a capsid polypeptide consisting of the amino acid sequence set forth in SEQ ID NO:1.

[0104] In another aspect, this document features an AAV capsid polypeptide comprising the amino acid sequence of any one of SEQ ID NOs:H2-H258. The polypeptide can comprise the amino acid sequence of SEQ ID NO:1 (or an alternative sequence that is the amino acid sequence set forth in SEQ ID NO:2206 or that is an amino acid sequence at least 95%, at least 96%, at least 97%, at least 98%, or at least 99% identical to the amino acid sequence set forth in SEQ ID NO:1) except that the amino acid sequence of any one of SEQ ID NOs:H2-H258 is located between amino acid positions 587 and 588 of SEQ ID NO:1 (or the appropriate amino acid positions of the alternative sequence). The polypeptide can comprise the amino acid sequence of SEQ ID NO:1 (or an alternative sequence that is the amino acid sequence set forth in SEQ ID NO:2206 or that is an amino acid sequence at least 95%, at least 96%, at least 97%, at least 98%, or at least 99% identical to the amino acid sequence set forth in SEQ ID NO:1) except that the amino acid sequence of any one of SEQ ID NOs:H2-H243 is located between amino acid positions 587 and 588 of SEQ ID NO:1 (or the appropriate amino acid positions of the alternative sequence). The polypeptide can comprise the amino acid sequence of SEQ ID NO:1 (or an alternative sequence that is the amino acid sequence set forth in SEQ ID NO:2206 or that is an amino acid sequence at least 95%, at least 96%, at least 97%, at least 98%, or at least 99% identical to the amino acid sequence set forth in SEQ ID NO: 1) except that the amino acids from position 585 to 590 of SEQ ID NO:1 are replaced with the amino acid sequence of any one of SEQ ID NOs:H2-H258. The polypeptide can comprise the amino acid sequence of SEQ ID NO:1 (or an alternative sequence that is the amino acid sequence set forth in SEQ ID NO:2206 or that is an amino acid sequence at least 95%, at least 96%, at least 97%, at least 98%, or at least 99% identical to the amino acid sequence set forth in SEQ ID NO:1) except that the amino acids from position 585 to 590 of SEQ ID NO:1 are replaced with the amino acid sequence of any one of SEQ ID NOs:H244-H258. An AAV vector comprising the polypeptide can infect greater than 2 percent of retinal ganglion cells of an eye when a titer of at least 1×10⁷ of the vector is administered intravitreally to the eye. An AAV vector comprising the polypeptide can express more nucleic acid in retinal ganglion cells than the level of expression from a comparable AAV vector comprising a capsid polypeptide consisting of the amino acid sequence set forth in SEQ ID NO:1.

[0105] In another aspect, this document features a nucleic acid molecule encoding an AAV vector comprising an AAV capsid polypeptide, wherein the capsid polypeptide comprises the amino acid sequence of any one of SEQ ID NOs:H2-H258. The capsid polypeptide can comprise the amino acid sequence of SEQ ID NO:1 (or an alternative sequence that is the amino acid sequence set forth in SEQ ID NO:2206 or that is an amino acid sequence at least 95%, at least 96%, at least 97%, at least 98%, or at least 99% identical to the amino acid sequence set forth in SEQ ID NO:1) except that the amino acid sequence of any one of SEQ ID NOs:H2-H258 is located between amino acid positions 587 and 588 of SEQ ID NO:1 (or the appropriate amino acid positions of the alternative sequence). The capsid polypeptide can comprise the amino acid sequence of SEQ ID NO:1 (or an alternative sequence that is the amino acid sequence set forth in SEQ ID NO:2206 or that is an amino acid sequence at least 95%, at least 96%, at least 97%, at least 98%, or at least 99% identical to the amino acid sequence set forth in SEQ ID NO:1) except that the amino acid sequence of any one of SEQ ID NOs:H2-H243 is located between amino acid positions 587 and 588 of SEQ ID NO:1 (or the appropriate amino acid positions of the alternative sequence). The capsid polypeptide can comprise the amino acid sequence of SEQ ID NO:1 (or an alternative sequence that is the amino acid sequence set forth in SEQ ID NO:2206 or that is an amino acid sequence at least 95%, at least 96%, at least 97%, at least 98%, or at least 99% identical to the amino acid sequence set forth in SEQ ID NO:1) except that the amino acids from position 585 to 590 of SEQ ID NO:1 are replaced with the amino acid sequence of any one of SEQ ID NOs:H2-H258. The capsid polypeptide can comprise the amino acid sequence of SEQ ID NO:1 (or an alternative sequence that is the amino acid sequence set forth in SEQ ID NO:2206 or that is an amino acid sequence at least 95%, at least 96%, at least 97%, at least 98%, or at least 99% identical to the amino acid sequence set forth in SEQ ID NO:1) except that the amino acids from position 585 to 590 of SEQ ID NO:1 are replaced with the amino acid sequence of any one of SEQ ID NOs:H244-H258. The vector can be an AAV2 vector. The vector can infect greater than 2 percent of retinal ganglion cells of an eye when a titer of at least 1×10⁷ of the vector is administered intravitreally to the eye. The vector can comprise an exogenous nucleic acid encoding an RNA or a polypeptide. The exogenous nucleic acid can encode an RNA. The RNA can be an siRNA or microRNA. The exogenous nucleic acid can encode a polypeptide. The polypeptide can be an ABCA4 polypeptide, a CRB1 polypeptide, an NPHP5 polypeptide, or an NR2E3 polypeptide. The vector can express more nucleic acid in retinal ganglion cells than the level of expression from a comparable AAV vector comprising a capsid polypeptide consisting of the amino acid sequence set forth in SEQ ID NO:1. The nucleic acid molecule can be DNA.

[0106] In another aspect, this document features a nucleic acid molecule encoding an AAV capsid polypeptide comprising the amino acid sequence of any one of SEQ ID NOs:H2-H258. The polypeptide can comprise the amino acid sequence of SEQ ID NO:1 (or an alternative sequence that is the amino acid sequence set forth in SEQ ID NO:2206 or that is an amino acid sequence at least 95%, at least 96%, at least 97%, at least 98%, or at least 99% identical to the amino acid sequence set forth in SEQ ID NO:1) except that the amino acid sequence of any one of SEQ ID NOs:H2-H258 is located between amino acid positions 587 and 588 of SEQ ID NO:1 (or the appropriate amino acid positions of the alternative sequence). The polypeptide can comprise the amino acid sequence of SEQ ID NO:1 (or an alternative sequence that is the amino acid sequence set forth in SEQ ID NO:2206 or that is an amino acid sequence at least 95%, at least 96%, at least 97%, at least 98%, or at least 99% identical to the amino acid sequence set forth in SEQ ID NO:1) except that the amino acid sequence of any one of SEQ ID NOs:H2-H243 is located between amino acid positions 587 and 588 of SEQ ID NO:1 (or the appropriate amino acid positions of the alternative sequence). The polypeptide can comprise the amino acid sequence of SEQ ID NO:1 (or an alternative sequence that is the amino acid sequence set forth in SEQ ID NO:2206 or that is an amino acid sequence at least 95%, at least 96%, at least 97%, at least 98%, or at least 99% identical to the amino acid sequence set forth in SEQ ID NO:1) except that the amino acids from position 585 to 590 of SEQ ID NO:1 are replaced with the amino acid sequence of any one of SEQ ID NOs:H2-H258. The polypeptide can comprise the amino acid sequence of SEQ ID NO:1 (or an alternative sequence that is the amino acid sequence set forth in SEQ ID NO:2206 or that is an amino acid sequence at least 95%, at least 96%, at least 97%, at least 98%, or at least 99% identical to the amino acid sequence set forth in SEQ ID NO:1) except that the amino acids from position 585 to 590 of SEQ ID NO:1 are replaced with the amino acid sequence of any one of SEQ ID NOs:H244-H258. An AAV vector comprising the polypeptide can infect greater than 2 percent of retinal ganglion cells of an eye when a titer of at least 1×10⁷ of the vector is administered intravitreally to the eye. An AAV vector comprising the polypeptide can express more nucleic acid in retinal ganglion cells than the level of expression from a comparable AAV vector comprising a capsid polypeptide consisting of the amino acid sequence set forth in SEQ ID NO:1. The nucleic acid molecule can be DNA.

[0107] In another aspect, this document features a host cell comprising a nucleic acid molecule of either of the two preceding paragraphs. The host cell can express the vector. The host cell can express the polypeptide.

[0108] In another aspect, this document features a host cell comprising an AAV vector comprising an AAV capsid polypeptide, wherein the capsid polypeptide comprises the amino acid sequence of any one of SEQ ID NOs:H2-H258. The capsid polypeptide can comprise the amino acid sequence of SEQ ID NO:1 (or an alternative sequence that is the amino acid sequence set forth in SEQ ID NO:2206 or that is an amino acid sequence at least 95%, at least 96%, at least 97%, at least 98%, or at least 99% identical to the amino acid sequence set forth in SEQ ID NO:1) except that the amino acid sequence of any one of SEQ ID NOs:H2-H258 is located between amino acid positions 587 and 588 of SEQ ID NO:1 (or the appropriate amino acid positions of the alternative sequence). The capsid polypeptide can comprise the amino acid sequence of SEQ ID NO:1 (or an alternative sequence that is the amino acid sequence set forth in SEQ ID NO:2206 or that is an amino acid sequence at least 95%, at least 96%, at least 97%, at least 98%, or at least 99% identical to the amino acid sequence set forth in SEQ ID NO:1) except that the amino acid sequence of any one of SEQ ID NOs:H2-H243 is located between amino acid positions 587 and 588 of SEQ ID NO:1 (or the appropriate amino acid positions of the alternative sequence). The capsid polypeptide can comprise the amino acid sequence of SEQ ID NO:1 (or an alternative sequence that is the amino acid sequence set forth in SEQ ID NO:2206 or that is an amino acid sequence at least 95%, at least 96%, at least 97%, at least 98%, or at least 99% identical to the amino acid sequence set forth in SEQ ID NO:1) except that the amino acids from position 585 to 590 of SEQ ID NO:1 are replaced with the amino acid sequence of any one of SEQ ID NOs:H2-H258. The capsid polypeptide can comprise the amino acid sequence of SEQ ID NO:1 (or an alternative sequence that is the amino acid sequence set forth in SEQ ID NO:2206 or that is an amino acid sequence at least 95%, at least 96%, at least 97%, at least 98%, or at least 99% identical to the amino acid sequence set forth in SEQ ID NO:1) except that the amino acids from position 585 to 590 of SEQ ID NO:1 are replaced with the amino acid sequence of any one of SEQ ID NOs:H244-H258. The vector can be an AAV2 vector. The vector can infect greater than 2 percent of retinal ganglion cells of an eye when a titer of at least 1×10⁷ of the vector is administered intravitreally to the eye. The vector can comprise an exogenous nucleic acid encoding an RNA or a polypeptide. The exogenous nucleic acid can encode an RNA. The RNA can be an siRNA or microRNA. The exogenous nucleic acid can encode a polypeptide. The polypeptide can be an ABCA4 polypeptide, a CRB1 polypeptide, an NPHP5 polypeptide, or an NR2E3 polypeptide. The vector can express more nucleic acid in retinal ganglion cells than the level of expression from a comparable AAV vector comprising a capsid polypeptide consisting of the amino acid sequence set forth in SEQ ID NO:1. The host cell can be a retinal cell.

[0109] In another aspect, this document features a host cell comprising an AAV capsid polypeptide comprising the amino acid sequence of any one of SEQ ID NOs:H2-H258. The polypeptide can comprise the amino acid sequence of SEQ ID NO:1 (or an alternative sequence that is the amino acid sequence set forth in SEQ ID NO:2206 or that is an amino acid sequence at least 95%, at least 96%, at least 97%, at least 98%, or at least 99% identical to the amino acid sequence set forth in SEQ ID NO:1) except that the amino acid sequence of any one of SEQ ID NOs:H2-H258 is located between amino acid positions 587 and 588 of SEQ ID NO:1 (or the appropriate amino acid positions of the alternative sequence). The polypeptide can comprise the amino acid sequence of SEQ ID NO:1 (or an alternative sequence that is the amino acid sequence set forth in SEQ ID NO:2206 or that is an amino acid sequence at least 95%, at least 96%, at least 97%, at least 98%, or at least 99% identical to the amino acid sequence set forth in SEQ ID NO:1) except that the amino acid sequence of any one of SEQ ID NOs:H2-H243 is located between amino acid positions 587 and 588 of SEQ ID NO:1 (or the appropriate amino acid positions of the alternative sequence). The polypeptide can comprise the amino acid sequence of SEQ ID NO:1 (or an alternative sequence that is the amino acid sequence set forth in SEQ ID NO:2206 or that is an amino acid sequence at least 95%, at least 96%, at least 97%, at least 98%, or at least 99% identical to the amino acid sequence set forth in SEQ ID NO:1) except that the amino acids from position 585 to 590 of SEQ ID NO:1 are replaced with the amino acid sequence of any one of SEQ ID NOs:H2-H258. The polypeptide can comprise the amino acid sequence of SEQ ID NO:1 (or an alternative sequence that is the amino acid sequence set forth in SEQ ID NO:2206 or that is an amino acid sequence at least 95%, at least 96%, at least 97%, at least 98%, or at least 99% identical to the amino acid sequence set forth in SEQ ID NO:1) except that the amino acids from position 585 to 590 of SEQ ID NO:1 are replaced with the amino acid sequence of any one of SEQ ID NOs:H244-H258. An AAV vector comprising the polypeptide can infect greater than 2 percent of retinal ganglion cells of an eye when a titer of at least 1×10⁷ of the vector is administered intravitreally to the eye. An AAV vector comprising the polypeptide can express more nucleic acid in retinal ganglion cells than the level of expression from a comparable AAV vector comprising a capsid polypeptide consisting of the amino acid sequence set forth in SEQ ID NO:1. The host cell can be a retinal cell.

[0110] In another aspect, this document features a composition comprising an AAV vector comprising an AAV capsid polypeptide, wherein the capsid polypeptide comprises the amino acid sequence of any one of SEQ ID NOs:H2-H258. The capsid polypeptide can comprise the amino acid sequence of SEQ ID NO:1 (or an alternative sequence that is the amino acid sequence set forth in SEQ ID NO:2206 or that is an amino acid sequence at least 95%, at least 96%, at least 97%, at least 98%, or at least 99% identical to the amino acid sequence set forth in SEQ ID NO:1) except that the amino acid sequence of any one of SEQ ID NOs:H2-H258 is located between amino acid positions 587 and 588 of SEQ ID NO:1 (or the appropriate amino acid positions of the alternative sequence). The capsid polypeptide can comprise the amino acid sequence of SEQ ID NO:1 (or an alternative sequence that is the amino acid sequence set forth in SEQ ID NO:2206 or that is an amino acid sequence at least 95%, at least 96%, at least 97%, at least 98%, or at least 99% identical to the amino acid sequence set forth in SEQ ID NO: 1) except that the amino acid sequence of any one of SEQ ID NOs:H2-H243 is located between amino acid positions 587 and 588 of SEQ ID NO:1 (or the appropriate amino acid positions of the alternative sequence). The capsid polypeptide can comprise the amino acid sequence of SEQ ID NO:1 (or an alternative sequence that is the amino acid sequence set forth in SEQ ID NO:2206 or that is an amino acid sequence at least 95%, at least 96%, at least 97%, at least 98%, or at least 99% identical to the amino acid sequence set forth in SEQ ID NO:1) except that the amino acids from position 585 to 590 of SEQ ID NO:1 are replaced with the amino acid sequence of any one of SEQ ID NOs:H2-H258. The capsid polypeptide can comprise the amino acid sequence of SEQ ID NO:1 (or an alternative sequence that is the amino acid sequence set forth in SEQ ID NO:2206 or that is an amino acid sequence at least 95%, at least 96%, at least 97%, at least 98%, or at least 99% identical to the amino acid sequence set forth in SEQ ID NO:1) except that the amino acids from position 585 to 590 of SEQ ID NO:1 are replaced with the amino acid sequence of any one of SEQ ID NOs:H244-H258. The vector can be an AAV2 vector. The vector can infect greater than 2 percent of retinal ganglion cells of an eye when a titer of at least 1×10⁷ of the vector is administered intravitreally to the eye. The vector can comprise an exogenous nucleic acid encoding an RNA or a polypeptide. The exogenous nucleic acid can encode an RNA. The RNA can be an siRNA or microRNA. The exogenous nucleic acid can encode a polypeptide. The polypeptide can be an ABCA4 polypeptide, a CRB1 polypeptide, an NPHP5 polypeptide, or an NR2E3 polypeptide. The vector can express more nucleic acid in retinal ganglion cells than the level of expression from a comparable AAV vector comprising a capsid polypeptide consisting of the amino acid sequence set forth in SEQ ID NO:1. The composition can comprise from about 1×10⁷ to about 1×10¹⁴ of the vector. The composition can comprise phosphate buffered saline, Hank's Balanced Salt Solution, or Pluronic F68.

[0111] In another aspect, this document features a method for delivering an exogenous nucleic acid sequence to a retinal ganglion cell within a mammal. The method comprises (or consists essentially of, or consists of) contacting the retinal ganglion cell with an AAV vector comprising an AAV capsid polypeptide and the exogenous nucleic acid sequence, wherein the capsid polypeptide comprises the amino acid sequence of any one of SEQ ID NOs:H2-H258, wherein the AAV vector infects the photoreceptor cell, thereby delivering the exogenous nucleic acid sequence to the photoreceptor cell. The capsid polypeptide can comprise the amino acid sequence of SEQ ID NO:1 (or an alternative sequence that is the amino acid sequence set forth in SEQ ID NO:2206 or that is an amino acid sequence at least 95%, at least 96%, at least 97%, at least 98%, or at least 99% identical to the amino acid sequence set forth in SEQ ID NO:1) except that the amino acid sequence of any one of SEQ ID NOs:H2-H258 is located between amino acid positions 587 and 588 of SEQ ID NO:1 (or the appropriate amino acid positions of the alternative sequence). The capsid polypeptide can comprise the amino acid sequence of SEQ ID NO:1 (or an alternative sequence that is the amino acid sequence set forth in SEQ ID NO:2206 or that is an amino acid sequence at least 95%, at least 96%, at least 97%, at least 98%, or at least 99% identical to the amino acid sequence set forth in SEQ ID NO:1) except that the amino acid sequence of any one of SEQ ID NOs:H2-H243 is located between amino acid positions 587 and 588 of SEQ ID NO:1 (or the appropriate amino acid positions of the alternative sequence). The capsid polypeptide can comprise the amino acid sequence of SEQ ID NO:1 (or an alternative sequence that is the amino acid sequence set forth in SEQ ID NO:2206 or that is an amino acid sequence at least 95%, at least 96%, at least 97%, at least 98%, or at least 99% identical to the amino acid sequence set forth in SEQ ID NO:1) except that the amino acids from position 585 to 590 of SEQ ID NO:1 are replaced with the amino acid sequence of any one of SEQ ID NOs:H2-H258. The capsid polypeptide can comprise the amino acid sequence of SEQ ID NO:1 (or an alternative sequence that is the amino acid sequence set forth in SEQ ID NO:2206 or that is an amino acid sequence at least 95%, at least 96%, at least 97%, at least 98%, or at least 99% identical to the amino acid sequence set forth in SEQ ID NO: 1) except that the amino acids from position 585 to 590 of SEQ ID NO:1 are replaced with the amino acid sequence of any one of SEQ ID NOs:H244-H258. The mammal can be a human (or a non-human primate). The vector can be an AAV2 vector. The vector can infect greater than 2 percent of retinal ganglion cells of an eye when a titer of at least 1×10⁷ of the vector is administered intravitreally to the eye. The exogenous nucleic acid sequence can encode an RNA or a polypeptide. The exogenous nucleic acid can encode an RNA. The RNA can be an siRNA or microRNA. The exogenous nucleic acid can encode a polypeptide. The polypeptide can be an ABCA4 polypeptide, a CRB1 polypeptide, an NPHP5 polypeptide, or an NR2E3 polypeptide. The vector can express more of the exogenous nucleic acid sequence in the retinal ganglion cell than the level of expression in a retinal ganglion cell from a comparable AAV vector comprising a capsid polypeptide consisting of the amino acid sequence set forth in SEQ ID NO:1. The method can comprise intravitreally administering a composition comprising the vector to the mammal, thereby contacting the retinal ganglion cell with the vector. The composition can comprise from about 1×10⁷ to about 1×10¹⁴ of the vector.

[0112] In another aspect, this document features a method for treating a retinal condition. The method comprises (or consists essentially of, or consists of) contacting retinal ganglion cells of a mammal having the retinal condition with AAV vectors comprising an AAV capsid polypeptide and an exogenous nucleic acid sequence, wherein the capsid polypeptide comprises the amino acid sequence of any one of SEQ ID NOs:H2-H258, wherein the AAV vectors infect the retinal ganglion cells and drive expression of the exogenous nucleic acid sequence within the retinal ganglion cells, thereby treating the retinal condition. The mammal can be a human (or a non-human primate). The retinal condition can be selected from the group consisting of cone dystrophy, cone/rod dystrophy, retinitis pigmentosa, macular degeneration, achromatopsia, blue cone monochromcy, and color blindness. The capsid polypeptide can comprise the amino acid sequence of SEQ ID NO:1 (or an alternative sequence that is the amino acid sequence set forth in SEQ ID NO:2206 or that is an amino acid sequence at least 95%, at least 96%, at least 97%, at least 98%, or at least 99% identical to the amino acid sequence set forth in SEQ ID NO:1) except that the amino acid sequence of any one of SEQ ID NOs:H2-H258 is located between amino acid positions 587 and 588 of SEQ ID NO:1 (or the appropriate amino acid positions of the alternative sequence). The capsid polypeptide can comprise the amino acid sequence of SEQ ID NO:1 (or an alternative sequence that is the amino acid sequence set forth in SEQ ID NO:2206 or that is an amino acid sequence at least 95%, at least 96%, at least 97%, at least 98%, or at least 99% identical to the amino acid sequence set forth in SEQ ID NO:1) except that the amino acid sequence of any one of SEQ ID NOs:H2-H243 is located between amino acid positions 587 and 588 of SEQ ID NO:1 (or the appropriate amino acid positions of the alternative sequence). The capsid polypeptide can comprise the amino acid sequence of SEQ ID NO:1 (or an alternative sequence that is the amino acid sequence set forth in SEQ ID NO:2206 or that is an amino acid sequence at least 95%, at least 96%, at least 97%, at least 98%, or at least 99% identical to the amino acid sequence set forth in SEQ ID NO:1) except that the amino acids from position 585 to 590 of SEQ ID NO:1 are replaced with the amino acid sequence of any one of SEQ ID NOs:H2-H258. The capsid polypeptide can comprise the amino acid sequence of SEQ ID NO:1 (or an alternative sequence that is the amino acid sequence set forth in SEQ ID NO:2206 or that is an amino acid sequence at least 95%, at least 96%, at least 97%, at least 98%, or at least 99% identical to the amino acid sequence set forth in SEQ ID NO: 1) except that the amino acids from position 585 to 590 of SEQ ID NO:1 are replaced with the amino acid sequence of any one of SEQ ID NOs:H244-H258. The vectors can be AAV2 vectors. The vectors can infect greater than 2 percent of retinal ganglion cells when a titer of at least 1×10¹⁴ of the vectors is administered intravitreally to an eye of the mammal. The exogenous nucleic acid sequence can encode an RNA. The RNA can be an siRNA or microRNA. The exogenous nucleic acid can encode a polypeptide. The polypeptide can be an ABCA4 polypeptide, a CRB1 polypeptide, an NPHP5 polypeptide, or an NR2E3 polypeptide. The vectors can express more of the exogenous nucleic acid sequence in the retinal ganglion cells than the level of expression in retinal ganglion cells from a comparable AAV vector comprising a capsid polypeptide consisting of the amino acid sequence set forth in SEQ ID NO:1. The method can comprise intravitreally administering a composition comprising the vectors to the mammal, thereby contacting the retinal ganglion cells with the vectors. The composition can comprise from about 1×10⁷ to about 1×10¹⁴ of the vector.

[0113] In another aspect, this document features an adeno-associated virus (AAV) vector comprising an AAV capsid polypeptide, wherein the capsid polypeptide comprises the amino acid sequence of any one of SEQ ID NOs:I2-I74. The capsid polypeptide can comprise the amino acid sequence of SEQ ID NO:1 (or an alternative sequence that is the amino acid sequence set forth in SEQ ID NO:2206 or that is an amino acid sequence at least 95%, at least 96%, at least 97%, at least 98%, or at least 99% identical to the amino acid sequence set forth in SEQ ID NO:1) except that the amino acid sequence of any one of SEQ ID NOs:I2-I74 is located between amino acid positions 587 and 588 of SEQ ID NO:1 (or the appropriate amino acid positions of the alternative sequence). The capsid polypeptide can comprise the amino acid sequence of SEQ ID NO:1 (or an alternative sequence that is the amino acid sequence set forth in SEQ ID NO:2206 or that is an amino acid sequence at least 95%, at least 96%, at least 97%, at least 98%, or at least 99% identical to the amino acid sequence set forth in SEQ ID NO:1) except that the amino acid sequence of any one of SEQ ID NOs:I2-I67 is located between amino acid positions 587 and 588 of SEQ ID NO:1 (or the appropriate amino acid positions of the alternative sequence). The capsid polypeptide can comprise the amino acid sequence of SEQ ID NO:1 (or an alternative sequence that is the amino acid sequence set forth in SEQ ID NO:2206 or that is an amino acid sequence at least 95%, at least 96%, at least 97%, at least 98%, or at least 99% identical to the amino acid sequence set forth in SEQ ID NO:1) except that the amino acids from position 585 to 590 of SEQ ID NO:1 are replaced with the amino acid sequence of any one of SEQ ID NOs:I2-I74. The capsid polypeptide can comprise the amino acid sequence of SEQ ID NO:1 (or an alternative sequence that is the amino acid sequence set forth in SEQ ID NO:2206 or that is an amino acid sequence at least 95%, at least 96%, at least 97%, at least 98%, or at least 99% identical to the amino acid sequence set forth in SEQ ID NO:1) except that the amino acids from position 585 to 590 of SEQ ID NO:1 are replaced with the amino acid sequence of any one of SEQ ID NOs:I68-I74. The vector can be an AAV2 vector. The vector can infect greater than 2 percent of bipolar cells of the retina of an eye when a titer of at least 1×10⁷ of the vector is administered intravitreally to the eye. The vector can comprise an exogenous nucleic acid encoding an RNA or a polypeptide. The exogenous nucleic acid can encode an RNA. The RNA can be an siRNA or microRNA. The exogenous nucleic acid can encode a polypeptide. The polypeptide can be an ABCA4 polypeptide, a CRB1 polypeptide, an NPHP5 polypeptide, or an NR2E3 polypeptide. The vector can express more nucleic acid in bipolar cells of the retina than the level of expression from a comparable AAV vector comprising a capsid polypeptide consisting of the amino acid sequence set forth in SEQ ID NO:1.

[0114] In another aspect, this document features an AAV capsid polypeptide comprising the amino acid sequence of any one of SEQ ID NOs:I2-I74. The capsid polypeptide can comprise the amino acid sequence of SEQ ID NO:1 (or an alternative sequence that is the amino acid sequence set forth in SEQ ID NO:2206 or that is an amino acid sequence at least 95%, at least 96%, at least 97%, at least 98%, or at least 99% identical to the amino acid sequence set forth in SEQ ID NO:1) except that the amino acid sequence of any one of SEQ ID NOs:I2-174 is located between amino acid positions 587 and 588 of SEQ ID NO:1 (or the appropriate amino acid positions of the alternative sequence). The capsid polypeptide can comprise the amino acid sequence of SEQ ID NO:1 (or an alternative sequence that is the amino acid sequence set forth in SEQ ID NO:2206 or that is an amino acid sequence at least 95%, at least 96%, at least 97%, at least 98%, or at least 99% identical to the amino acid sequence set forth in SEQ ID NO:1) except that the amino acid sequence of any one of SEQ ID NOs:I2-167 is located between amino acid positions 587 and 588 of SEQ ID NO:1 (or the appropriate amino acid positions of the alternative sequence). The capsid polypeptide can comprise the amino acid sequence of SEQ ID NO:1 (or an alternative sequence that is the amino acid sequence set forth in SEQ ID NO:2206 or that is an amino acid sequence at least 95%, at least 96%, at least 97%, at least 98%, or at least 99% identical to the amino acid sequence set forth in SEQ ID NO:1) except that the amino acids from position 585 to 590 of SEQ ID NO:1 are replaced with the amino acid sequence of any one of SEQ ID NOs:I2-I74. The capsid polypeptide can comprise the amino acid sequence of SEQ ID NO:1 (or an alternative sequence that is the amino acid sequence set forth in SEQ ID NO:2206 or that is an amino acid sequence at least 95%, at least 96%, at least 97%, at least 98%, or at least 99% identical to the amino acid sequence set forth in SEQ ID NO:1) except that the amino acids from position 585 to 590 of SEQ ID NO:1 are replaced with the amino acid sequence of any one of SEQ ID NOs:I68-I74. An AAV vector comprising the polypeptide can infect greater than 2 percent of bipolar cells of the retina of an eye when a titer of at least 1×10⁷ of the vector is administered intravitreally to the eye. An AAV vector comprising the polypeptide can express more nucleic acid in bipolar cells of the retina than the level of expression from a comparable AAV vector comprising a capsid polypeptide consisting of the amino acid sequence set forth in SEQ ID NO:1.

[0115] In another aspect, this document features a nucleic acid molecule encoding an AAV vector comprising an AAV capsid polypeptide, wherein the capsid polypeptide comprises the amino acid sequence of any one of SEQ ID NOs:I2-I74. The capsid polypeptide can comprise the amino acid sequence of SEQ ID NO:1 (or an alternative sequence that is the amino acid sequence set forth in SEQ ID NO:2206 or that is an amino acid sequence at least 95%, at least 96%, at least 97%, at least 98%, or at least 99% identical to the amino acid sequence set forth in SEQ ID NO:1) except that the amino acid sequence of any one of SEQ ID NOs:I2-I74 is located between amino acid positions 587 and 588 of SEQ ID NO:1 (or the appropriate amino acid positions of the alternative sequence). The capsid polypeptide can comprise the amino acid sequence of SEQ ID NO:1 (or an alternative sequence that is the amino acid sequence set forth in SEQ ID NO:2206 or that is an amino acid sequence at least 95%, at least 96%, at least 97%, at least 98%, or at least 99% identical to the amino acid sequence set forth in SEQ ID NO:1) except that the amino acid sequence of any one of SEQ ID NOs:I2-I67 is located between amino acid positions 587 and 588 of SEQ ID NO:1 (or the appropriate amino acid positions of the alternative sequence). The capsid polypeptide can comprise the amino acid sequence of SEQ ID NO:1 (or an alternative sequence that is the amino acid sequence set forth in SEQ ID NO:2206 or that is an amino acid sequence at least 95%, at least 96%, at least 97%, at least 98%, or at least 99% identical to the amino acid sequence set forth in SEQ ID NO:1) except that the amino acids from position 585 to 590 of SEQ ID NO:1 are replaced with the amino acid sequence of any one of SEQ ID NOs:I2-I74. The capsid polypeptide can comprise the amino acid sequence of SEQ ID NO:1 (or an alternative sequence that is the amino acid sequence set forth in SEQ ID NO:2206 or that is an amino acid sequence at least 95%, at least 96%, at least 97%, at least 98%, or at least 99% identical to the amino acid sequence set forth in SEQ ID NO:1) except that the amino acids from position 585 to 590 of SEQ ID NO:1 are replaced with the amino acid sequence of any one of SEQ ID NOs:I68-I74. The vector can be an AAV2 vector. The vector can infect greater than 2 percent of bipolar cells of the retina of an eye when a titer of at least 1×10⁷ of the vector is administered intravitreally to the eye. The vector can comprise an exogenous nucleic acid encoding an RNA or a polypeptide. The exogenous nucleic acid can encode an RNA. The RNA can be an siRNA or microRNA. The exogenous nucleic acid can encode a polypeptide. The polypeptide can be an ABCA4 polypeptide, a CRB1 polypeptide, an NPHP5 polypeptide, or an NR2E3 polypeptide. The vector can express more nucleic acid in bipolar cells of the retina than the level of expression from a comparable AAV vector comprising a capsid polypeptide consisting of the amino acid sequence set forth in SEQ ID NO:1. The nucleic acid molecule can be DNA.

[0116] In another aspect, this document features a nucleic acid molecule encoding an AAV capsid polypeptide comprising the amino acid sequence of any one of SEQ ID NOs:I2-I74. The capsid polypeptide can comprise the amino acid sequence of SEQ ID NO:1 (or an alternative sequence that is the amino acid sequence set forth in SEQ ID NO:2206 or that is an amino acid sequence at least 95%, at least 96%, at least 97%, at least 98%, or at least 99% identical to the amino acid sequence set forth in SEQ ID NO:1) except that the amino acid sequence of any one of SEQ ID NOs:I2-I74 is located between amino acid positions 587 and 588 of SEQ ID NO:1 (or the appropriate amino acid positions of the alternative sequence). The capsid polypeptide can comprise the amino acid sequence of SEQ ID NO:1 (or an alternative sequence that is the amino acid sequence set forth in SEQ ID NO:2206 or that is an amino acid sequence at least 95%, at least 96%, at least 97%, at least 98%, or at least 99% identical to the amino acid sequence set forth in SEQ ID NO:1) except that the amino acid sequence of any one of SEQ ID NOs:I2-167 is located between amino acid positions 587 and 588 of SEQ ID NO:1 (or the appropriate amino acid positions of the alternative sequence). The capsid polypeptide can comprise the amino acid sequence of SEQ ID NO:1 (or an alternative sequence that is the amino acid sequence set forth in SEQ ID NO:2206 or that is an amino acid sequence at least 95%, at least 96%, at least 97%, at least 98%, or at least 99% identical to the amino acid sequence set forth in SEQ ID NO:1) except that the amino acids from position 585 to 590 of SEQ ID NO:1 are replaced with the amino acid sequence of any one of SEQ ID NOs:I2-174. The capsid polypeptide can comprise the amino acid sequence of SEQ ID NO:1 (or an alternative sequence that is the amino acid sequence set forth in SEQ ID NO:2206 or that is an amino acid sequence at least 95%, at least 96%, at least 97%, at least 98%, or at least 99% identical to the amino acid sequence set forth in SEQ ID NO:1) except that the amino acids from position 585 to 590 of SEQ ID NO:1 are replaced with the amino acid sequence of any one of SEQ ID NOs:I68-I74. An AAV vector comprising the polypeptide can infect greater than 2 percent of bipolar cells of the retina of an eye when a titer of at least 1×10⁷ of the vector is administered intravitreally to the eye. An AAV vector comprising the polypeptide can express more nucleic acid in bipolar cells of the retina than the level of expression from a comparable AAV vector comprising a capsid polypeptide consisting of the amino acid sequence set forth in SEQ ID NO:1. The nucleic acid molecule can be DNA.

[0117] In another aspect, this document features a host cell comprising a nucleic acid molecule of either of the two preceding paragraphs. The host cell can express the vector. The host cell can express the polypeptide.

[0118] In another aspect, this document features a host cell comprising an AAV vector comprising an AAV capsid polypeptide, wherein the capsid polypeptide comprises the amino acid sequence of any one of SEQ ID NOs:I2-I74. The capsid polypeptide can comprise the amino acid sequence of SEQ ID NO:1 (or an alternative sequence that is the amino acid sequence set forth in SEQ ID NO:2206 or that is an amino acid sequence at least 95%, at least 96%, at least 97%, at least 98%, or at least 99% identical to the amino acid sequence set forth in SEQ ID NO:1) except that the amino acid sequence of any one of SEQ ID NOs:I2-I74 is located between amino acid positions 587 and 588 of SEQ ID NO:1 (or the appropriate amino acid positions of the alternative sequence). The capsid polypeptide can comprise the amino acid sequence of SEQ ID NO:1 (or an alternative sequence that is the amino acid sequence set forth in SEQ ID NO:2206 or that is an amino acid sequence at least 95%, at least 96%, at least 97%, at least 98%, or at least 99% identical to the amino acid sequence set forth in SEQ ID NO:1) except that the amino acid sequence of any one of SEQ ID NOs:I2-167 is located between amino acid positions 587 and 588 of SEQ ID NO:1 (or the appropriate amino acid positions of the alternative sequence). The capsid polypeptide can comprise the amino acid sequence of SEQ ID NO:1 (or an alternative sequence that is the amino acid sequence set forth in SEQ ID NO:2206 or that is an amino acid sequence at least 95%, at least 96%, at least 97%, at least 98%, or at least 99% identical to the amino acid sequence set forth in SEQ ID NO:1) except that the amino acids from position 585 to 590 of SEQ ID NO:1 are replaced with the amino acid sequence of any one of SEQ ID NOs:I2-I74. The capsid polypeptide can comprise the amino acid sequence of SEQ ID NO:1 (or an alternative sequence that is the amino acid sequence set forth in SEQ ID NO:2206 or that is an amino acid sequence at least 95%, at least 96%, at least 97%, at least 98%, or at least 99% identical to the amino acid sequence set forth in SEQ ID NO:1) except that the amino acids from position 585 to 590 of SEQ ID NO:1 are replaced with the amino acid sequence of any one of SEQ ID NOs:I68-I74. The vector can be an AAV2 vector. The vector can infect greater than 2 percent of bipolar cells of the retina of an eye when a titer of at least 1×10⁷ of the vector is administered intravitreally to the eye. The vector can comprise an exogenous nucleic acid encoding an RNA or a polypeptide. The exogenous nucleic acid can encode an RNA. The RNA can be an siRNA or microRNA. The exogenous nucleic acid can encode a polypeptide. The polypeptide can be an ABCA4 polypeptide, a CRB1 polypeptide, an NPHP5 polypeptide, or an NR2E3 polypeptide. The vector can express more nucleic acid in bipolar cells of the retina than the level of expression from a comparable AAV vector comprising a capsid polypeptide consisting of the amino acid sequence set forth in SEQ ID NO:1. The host cell can be a retinal cell.

[0119] In another aspect, this document features a host cell comprising an AAV capsid polypeptide comprising the amino acid sequence of any one of SEQ ID NOs:I2-I74. The capsid polypeptide can comprise the amino acid sequence of SEQ ID NO:1 (or an alternative sequence that is the amino acid sequence set forth in SEQ ID NO:2206 or that is an amino acid sequence at least 95%, at least 96%, at least 97%, at least 98%, or at least 99% identical to the amino acid sequence set forth in SEQ ID NO:1) except that the amino acid sequence of any one of SEQ ID NOs:I2-174 is located between amino acid positions 587 and 588 of SEQ ID NO:1 (or the appropriate amino acid positions of the alternative sequence). The capsid polypeptide can comprise the amino acid sequence of SEQ ID NO:1 (or an alternative sequence that is the amino acid sequence set forth in SEQ ID NO:2206 or that is an amino acid sequence at least 95%, at least 96%, at least 97%, at least 98%, or at least 99% identical to the amino acid sequence set forth in SEQ ID NO:1) except that the amino acid sequence of any one of SEQ ID NOs:I2-167 is located between amino acid positions 587 and 588 of SEQ ID NO:1 (or the appropriate amino acid positions of the alternative sequence). The capsid polypeptide can comprise the amino acid sequence of SEQ ID NO:1 (or an alternative sequence that is the amino acid sequence set forth in SEQ ID NO:2206 or that is an amino acid sequence at least 95%, at least 96%, at least 97%, at least 98%, or at least 99% identical to the amino acid sequence set forth in SEQ ID NO:1) except that the amino acids from position 585 to 590 of SEQ ID NO:1 are replaced with the amino acid sequence of any one of SEQ ID NOs:I2-174. The capsid polypeptide can comprise the amino acid sequence of SEQ ID NO:1 (or an alternative sequence that is the amino acid sequence set forth in SEQ ID NO:2206 or that is an amino acid sequence at least 95%, at least 96%, at least 97%, at least 98%, or at least 99% identical to the amino acid sequence set forth in SEQ ID NO:1) except that the amino acids from position 585 to 590 of SEQ ID NO:1 are replaced with the amino acid sequence of any one of SEQ ID NOs:I68-I74. An AAV vector comprising the polypeptide can infect greater than 2 percent of bipolar cells of the retina of an eye when a titer of at least 1×10⁷ of the vector is administered intravitreally to the eye. An AAV vector comprising the polypeptide can express more nucleic acid in bipolar cells of the retina than the level of expression from a comparable AAV vector comprising a capsid polypeptide consisting of the amino acid sequence set forth in SEQ ID NO:1. The host cell can be a retinal cell.

[0120] In another aspect, this document features a composition comprising an AAV vector comprising an AAV capsid polypeptide, wherein the capsid polypeptide comprises the amino acid sequence of any one of SEQ ID NOs:I2-174. The capsid polypeptide can comprise the amino acid sequence of SEQ ID NO:1 (or an alternative sequence that is the amino acid sequence set forth in SEQ ID NO:2206 or that is an amino acid sequence at least 95%, at least 96%, at least 97%, at least 98%, or at least 99% identical to the amino acid sequence set forth in 10.5 SEQ ID NO:1) except that the amino acid sequence of any one of SEQ ID NOs:I2-I74 is located between amino acid positions 587 and 588 of SEQ ID NO:1 (or the appropriate amino acid positions of the alternative sequence). The capsid polypeptide can comprise the amino acid sequence of SEQ ID NO:1 (or an alternative sequence that is the amino acid sequence set forth in SEQ ID NO:2206 or that is an amino acid sequence at least 95%, at least 96%, at least 97%, at least 98%, or at least 99% identical to the amino acid sequence set forth in SEQ ID NO: 1) except that the amino acid sequence of any one of SEQ ID NOs:I2-167 is located between amino acid positions 587 and 588 of SEQ ID NO:1 (or the appropriate amino acid positions of the alternative sequence). The capsid polypeptide can comprise the amino acid sequence of SEQ ID NO:1 (or an alternative sequence that is the amino acid sequence set forth in SEQ ID NO:2206 or that is an amino acid sequence at least 95%, at least 96%, at least 97%, at least 98%, or at least 99% identical to the amino acid sequence set forth in SEQ ID NO:1) except that the amino acids from position 585 to 590 of SEQ ID NO:1 are replaced with the amino acid sequence of any one of SEQ ID NOs:I2-I74. The capsid polypeptide can comprise the amino acid sequence of SEQ ID NO:1 (or an alternative sequence that is the amino acid sequence set forth in SEQ ID NO:2206 or that is an amino acid sequence at least 95%, at least 96%, at least 97%, at least 98%, or at least 99% identical to the amino acid sequence set forth in SEQ ID NO:1) except that the amino acids from position 585 to 590 of SEQ ID NO:1 are replaced with the amino acid sequence of any one of SEQ ID NOs:I68-I74. The vector can be an AAV2 vector. The vector can infect greater than 2 percent of bipolar cells of the retina of an eye when a titer of at least 1×10⁷ of the vector is administered intravitreally to the eye. The vector can comprise an exogenous nucleic acid encoding an RNA or a polypeptide. The exogenous nucleic acid can encode an RNA. The RNA can be an siRNA or microRNA. The exogenous nucleic acid can encode a polypeptide. The polypeptide can be an ABCA4 polypeptide, a CRB1 polypeptide, an NPHP5 polypeptide, or an NR2E3 polypeptide. The vector can express more nucleic acid in bipolar cells of the retina than the level of expression from a comparable AAV vector comprising a capsid polypeptide consisting of the amino acid sequence set forth in SEQ ID NO:1. The composition can comprise from about 1×10⁷ to about 1×10¹⁴ of the vector. The composition can comprise phosphate buffered saline, Hank's Balanced Salt Solution, or Pluronic F68.

[0121] In another aspect, this document features a method for delivering an exogenous nucleic acid sequence to a bipolar cell of the retina within a mammal. The method comprises (or consists essentially of, or consists of) contacting the bipolar cell with an AAV vector comprising an AAV capsid polypeptide and the exogenous nucleic acid sequence, wherein the capsid polypeptide comprises the amino acid sequence of any one of SEQ ID NOs:I2-I74, wherein the AAV vector infects the bipolar cell, thereby delivering the exogenous nucleic acid sequence to the bipolar cell. The capsid polypeptide can comprise the amino acid sequence of SEQ ID NO:1 (or an alternative sequence that is the amino acid sequence set forth in SEQ ID NO:2206 or that is an amino acid sequence at least 95%, at least 96%, at least 97%, at least 98%, or at least 99% identical to the amino acid sequence set forth in SEQ ID NO:1) except that the amino acid sequence of any one of SEQ ID NOs:I2-I74 is located between amino acid positions 587 and 588 of SEQ ID NO:1 (or the appropriate amino acid positions of the alternative sequence). The capsid polypeptide can comprise the amino acid sequence of SEQ ID NO:1 (or an alternative sequence that is the amino acid sequence set forth in SEQ ID NO:2206 or that is an amino acid sequence at least 95%, at least 96%, at least 97%, at least 98%, or at least 99% identical to the amino acid sequence set forth in SEQ ID NO:1) except that the amino acid sequence of any one of SEQ ID NOs:I2-I67 is located between amino acid positions 587 and 588 of SEQ ID NO:1 (or the appropriate amino acid positions of the alternative sequence). The capsid polypeptide can comprise the amino acid sequence of SEQ ID NO:1 (or an alternative sequence that is the amino acid sequence set forth in SEQ ID NO:2206 or that is an amino acid sequence at least 95%, at least 96%, at least 97%, at least 98%, or at least 99% identical to the amino acid sequence set forth in SEQ ID NO:1) except that the amino acids from position 585 to 590 of SEQ ID NO: 1 are replaced with the amino acid sequence of any one of SEQ ID NOs:I2-I74. The capsid polypeptide can comprise the amino acid sequence of SEQ ID NO:1 (or an alternative sequence that is the amino acid sequence set forth in SEQ ID NO:2206 or that is an amino acid sequence at least 95%, at least 96%, at least 97%, at least 98%, or at least 99% identical to the amino acid sequence set forth in SEQ ID NO:1) except that the amino acids from position 585 to 590 of SEQ ID NO:1 are replaced with the amino acid sequence of any one of SEQ ID NOs:I68-I74. The mammal can be a human (or a non-human primate). The vector can be an AAV2 vector. The vector can infect greater than 2 percent of bipolar cells of the retina of an eye when a titer of at least 1×10⁷ of the vector is administered intravitreally to the eye. The exogenous nucleic acid sequence can encode an RNA or a polypeptide. The exogenous nucleic acid can encode an RNA. The RNA can be an siRNA or microRNA. The exogenous nucleic acid can encode a polypeptide. The polypeptide can be an ABCA4 polypeptide, a CRB1 polypeptide, an NPHP5 polypeptide, or an NR2E3 polypeptide. The vector can express more of the exogenous nucleic acid sequence in the bipolar cell than the level of expression in a bipolar cell of the retina from a comparable AAV vector comprising a capsid polypeptide consisting of the amino acid sequence set forth in SEQ ID NO:1. The method can comprise intravitreally administering a composition comprising the vector to the mammal, thereby contacting the bipolar cell with the vector. The composition can comprise from about 1×10⁷ to about 1×10¹⁴ of the vector.

[0122] In another aspect, this document features a method for treating a retinal condition. The method comprises (or consists essentially of, or consists of) contacting bipolar cells of the retina of a mammal having the retinal condition with AAV vectors comprising an AAV capsid polypeptide and an exogenous nucleic acid sequence, wherein the capsid polypeptide comprises the amino acid sequence of any one of SEQ ID NOs:I2-174, wherein the AAV vectors infect the bipolar cells and drive expression of the exogenous nucleic acid sequence within the bipolar cells, thereby treating the retinal condition. The mammal can be a human (or a non-human primate). The retinal condition can be selected from the group consisting of cone dystrophy, cone/rod dystrophy, retinitis pigmentosa, macular degeneration, achromatopsia, blue cone monochromcy, and color blindness. The capsid polypeptide can comprise the amino acid sequence of SEQ ID NO:1 (or an alternative sequence that is the amino acid sequence set forth in SEQ ID NO:2206 or that is an amino acid sequence at least 95%, at least 96%, at least 97%, at least 98%, or at least 99% identical to the amino acid sequence set forth in SEQ ID NO:1) except that the amino acid sequence of any one of SEQ ID NOs:I2-174 is located between amino acid positions 587 and 588 of SEQ ID NO:1 (or the appropriate amino acid positions of the alternative sequence). The capsid polypeptide can comprise the amino acid sequence of SEQ ID NO:1 (or an alternative sequence that is the amino acid sequence set forth in SEQ ID NO:2206 or that is an amino acid sequence at least 95%, at least 96%, at least 97%, at least 98%, or at least 99% identical to the amino acid sequence set forth in SEQ ID NO:1) except that the amino acid sequence of any one of SEQ ID NOs:I2-I67 is located between amino acid positions 587 and 588 of SEQ ID NO:1 (or the appropriate amino acid positions of the alternative sequence). The capsid polypeptide can comprise the amino acid sequence of SEQ ID NO:1 (or an alternative sequence that is the amino acid sequence set forth in SEQ ID NO:2206 or that is an amino acid sequence at least 95%, at least 96%, at least 97%, at least 98%, or at least 99% identical to the amino acid sequence set forth in SEQ ID NO:1) except that the amino acids from position 585 to 590 of SEQ ID NO:1 are replaced with the amino acid sequence of any one of SEQ ID NOs:I2-174. The capsid polypeptide can comprise the amino acid sequence of SEQ ID NO:1 (or an alternative sequence that is the amino acid sequence set forth in SEQ ID NO:2206 or that is an amino acid sequence at least 95%, at least 96%, at least 97%, at least 98%, or at least 99% identical to the amino acid sequence set forth in SEQ ID NO: 1) except that the amino acids from position 585 to 590 of SEQ ID NO:1 are replaced with the amino acid sequence of any one of SEQ ID NOs:I68-174. The vectors can be AAV2 vectors. The vectors can infect greater than 2 percent of bipolar cells of the retina when a titer of at least 1×10⁷ of the vectors is administered intravitreally to an eye of the mammal. The exogenous nucleic acid sequence can encode an RNA. The RNA can be an siRNA or microRNA. The exogenous nucleic acid can encode a polypeptide. The polypeptide can be an ABCA4 polypeptide, a CRB1 polypeptide, an NPHP5 polypeptide, or an NR2E3 polypeptide. The vectors can express more of the exogenous nucleic acid sequence in the bipolar cells than the level of expression in bipolar cells of the retina from a comparable AAV vector comprising a capsid polypeptide consisting of the amino acid sequence set forth in SEQ ID NO:1. The method can comprise intravitreally administering a composition comprising the vectors to the mammal, thereby contacting the bipolar cells with the vectors. The composition can comprise from about 1×10⁷ to about 1×10¹⁴ of the vector.

[0123] In another aspect, this document features an adeno-associated virus (AAV) vector comprising an AAV capsid polypeptide, wherein the capsid polypeptide comprises the amino acid sequence of any one of SEQ ID NOs:J2-J64. The capsid polypeptide can comprise the amino acid sequence of SEQ ID NO:1 (or an alternative sequence that is the amino acid sequence set forth in SEQ ID NO:2206 or that is an amino acid sequence at least 95%, at least 96%, at least 97%, at least 98%, or at least 99% identical to the amino acid sequence set forth in SEQ ID NO:1) except that the amino acid sequence of any one of SEQ ID NOs:J2-J64 is located between amino acid positions 587 and 588 of SEQ ID NO:1 (or the appropriate amino acid positions of the alternative sequence). The capsid polypeptide can comprise the amino acid sequence of SEQ ID NO:1 (or an alternative sequence that is the amino acid sequence set forth in SEQ ID NO:2206 or that is an amino acid sequence at least 95%, at least 96%, at least 97%, at least 98%, or at least 99% identical to the amino acid sequence set forth in SEQ ID NO:1) except that the amino acid sequence of any one of SEQ ID NOs:J2-J61 is located between amino acid positions 587 and 588 of SEQ ID NO:1 (or the appropriate amino acid positions of the alternative sequence). The capsid polypeptide can comprise the amino acid sequence of SEQ ID NO:1 (or an alternative sequence that is the amino acid sequence set forth in SEQ ID NO:2206 or that is an amino acid sequence at least 95%, at least 96%, at least 97%, at least 98%, or at least 99% identical to the amino acid sequence set forth in SEQ ID NO:1) except that the amino acids from position 585 to 590 of SEQ ID NO:1 are replaced with the amino acid sequence of any one of SEQ ID NOs:J2-J64. The capsid polypeptide can comprise the amino acid sequence of SEQ ID NO:1 (or an alternative sequence that is the amino acid sequence set forth in SEQ ID NO:2206 or that is an amino acid sequence at least 95%, at least 96%, at least 97%, at least 98%, or at least 99% identical to the amino acid sequence set forth in SEQ ID NO:1) except that the amino acids from position 585 to 590 of SEQ ID NO:1 are replaced with the amino acid sequence of any one of SEQ ID NOs:J62-J64. The vector can be an AAV2 vector. The vector can infect greater than 2 percent of ON-retinal ganglion cells of an eye when a titer of at least 1×10⁷ of the vector is administered intravitreally to the eye. The vector can comprise an exogenous nucleic acid encoding an RNA or a polypeptide. The exogenous nucleic acid can encode an RNA. The RNA can be an siRNA or microRNA. The exogenous nucleic acid can encode a polypeptide. The polypeptide can be an ABCA4 polypeptide, a CRB1 polypeptide, an NPHP5 polypeptide, or an NR2E3 polypeptide. The vector can express more nucleic acid in ON-retinal ganglion cells than the level of expression from a comparable AAV vector comprising a capsid polypeptide consisting of the amino acid sequence set forth in SEQ ID NO:1.

[0124] In another aspect, this document features an AAV capsid polypeptide comprising the amino acid sequence of any one of SEQ ID NOs:J2-J64. The polypeptide can comprise the amino acid sequence of SEQ ID NO:1 (or an alternative sequence that is the amino acid sequence set forth in SEQ ID NO:2206 or that is an amino acid sequence at least 95%, at least 96%, at least 97%, at least 98%, or at least 99% identical to the amino acid sequence set forth in SEQ ID NO:1) except that the amino acid sequence of any one of SEQ ID NOs:J2-J64 is located between amino acid positions 587 and 588 of SEQ ID NO:1 (or the appropriate amino acid positions of the alternative sequence). The polypeptide can comprise the amino acid sequence of SEQ ID NO:1 (or an alternative sequence that is the amino acid sequence set forth in SEQ ID NO:2206 or that is an amino acid sequence at least 95%, at least 96%, at least 97%, at least 98%, or at least 99% identical to the amino acid sequence set forth in SEQ ID NO:1) except that the amino acid sequence of any one of SEQ ID NOs:J2-J61 is located between amino acid positions 587 and 588 of SEQ ID NO:1 (or the appropriate amino acid positions of the alternative sequence). The polypeptide can comprise the amino acid sequence of SEQ ID NO:1 (or an alternative sequence that is the amino acid sequence set forth in SEQ ID NO:2206 or that is an amino acid sequence at least 95%, at least 96%, at least 97%, at least 98%, or at least 99% identical to the amino acid sequence set forth in SEQ ID NO: 1) except that the amino acids from position 585 to 590 of SEQ ID NO:1 are replaced with the amino acid sequence of any one of SEQ ID NOs:J2-J64. The polypeptide can comprise the amino acid sequence of SEQ ID NO:1 (or an alternative sequence that is the amino acid sequence set forth in SEQ ID NO:2206 or that is an amino acid sequence at least 95%, at least 96%, at least 97%, at least 98%, or at least 99% identical to the amino acid sequence set forth in SEQ ID NO: 1) except that the amino acids from position 585 to 590 of SEQ ID NO:1 are replaced with the amino acid sequence of any one of SEQ ID NOs:J62-J64. An AAV vector comprising the polypeptide can infect greater than 2 percent of ON-retinal ganglion cells of an eye when a titer of at least 1×10⁷ of the vector is administered intravitreally to the eye. An AAV vector comprising the polypeptide can express more nucleic acid in ON-retinal ganglion cells than the level of expression from a comparable AAV vector comprising a capsid polypeptide consisting of the amino acid sequence set forth in SEQ ID NO:1.

[0125] In another aspect, this document features a nucleic acid molecule encoding an AAV vector comprising an AAV capsid polypeptide, wherein the capsid polypeptide comprises the amino acid sequence of any one of SEQ ID NOs:J2-J64. The capsid polypeptide can comprise the amino acid sequence of SEQ ID NO:1 (or an alternative sequence that is the amino acid sequence set forth in SEQ ID NO:2206 or that is an amino acid sequence at least 95%, at least 96%, at least 97%, at least 98%, or at least 99% identical to the amino acid sequence set forth in SEQ ID NO:1) except that the amino acid sequence of any one of SEQ ID NOs:J2-J64 is located between amino acid positions 587 and 588 of SEQ ID NO:1 (or the appropriate amino acid positions of the alternative sequence). The capsid polypeptide can comprise the amino acid sequence of SEQ ID NO:1 (or an alternative sequence that is the amino acid sequence set forth in SEQ ID NO:2206 or that is an amino acid sequence at least 95%, at least 96%, at least 97%, at least 98%, or at least 99% identical to the amino acid sequence set forth in SEQ ID NO:1) except that the amino acid sequence of any one of SEQ ID NOs:J2-J61 is located between amino acid positions 587 and 588 of SEQ ID NO:1 (or the appropriate amino acid positions of the alternative sequence). The capsid polypeptide can comprise the amino acid sequence of SEQ ID NO:1 (or an alternative sequence that is the amino acid sequence set forth in SEQ ID NO:2206 or that is an amino acid sequence at least 95%, at least 96%, at least 97%, at least 98%, or at least 99% identical to the amino acid sequence set forth in SEQ ID NO:1) except that the amino acids from position 585 to 590 of SEQ ID NO:1 are replaced with the amino acid sequence of any one of SEQ ID NOs:J2-J64. The capsid polypeptide can comprise the amino acid sequence of SEQ ID NO:1 (or an alternative sequence that is the amino acid sequence set forth in SEQ ID NO:2206 or that is an amino acid sequence at least 95%, at least 96%, at least 97%, at least 98%, or at least 99% identical to the amino acid sequence set forth in SEQ ID NO:1) except that the amino acids from position 585 to 590 of SEQ ID NO:1 are replaced with the amino acid sequence of any one of SEQ ID NOs:J62-J64. The vector can be an AAV2 vector. The vector can infect greater than 2 percent of ON-retinal ganglion cells of an eye when a titer of at least 1×10⁷ of the vector is administered intravitreally to the eye. The vector can comprise an exogenous nucleic acid encoding an RNA or a polypeptide. The exogenous nucleic acid can encode an RNA. The RNA can be an siRNA or microRNA. The exogenous nucleic acid can encode a polypeptide. The polypeptide can be an ABCA4 polypeptide, a CRB1 polypeptide, an NPHP5 polypeptide, or an NR2E3 polypeptide. The vector can express more nucleic acid in ON-retinal ganglion cells than the level of expression from a comparable AAV vector comprising a capsid polypeptide consisting of the amino acid sequence set forth in SEQ ID NO:1. The nucleic acid molecule can be DNA.

[0126] In another aspect, this document features a nucleic acid molecule encoding an AAV capsid polypeptide comprising the amino acid sequence of any one of SEQ ID NOs:J2-J64. The polypeptide can comprise the amino acid sequence of SEQ ID NO:1 (or an alternative sequence that is the amino acid sequence set forth in SEQ ID NO:2206 or that is an amino acid sequence at least 95%, at least 96%, at least 97%, at least 98%, or at least 99% identical to the amino acid sequence set forth in SEQ ID NO:1) except that the amino acid sequence of any one of SEQ ID NOs:J2-J64 is located between amino acid positions 587 and 588 of SEQ ID NO:1 (or the appropriate amino acid positions of the alternative sequence). The polypeptide can comprise the amino acid sequence of SEQ ID NO:1 (or an alternative sequence that is the amino acid sequence set forth in SEQ ID NO:2206 or that is an amino acid sequence at least 95%, at least 96%, at least 97%, at least 98%, or at least 99% identical to the amino acid sequence set forth in SEQ ID NO:1) except that the amino acid sequence of any one of SEQ ID NOs:J2-J61 is located between amino acid positions 587 and 588 of SEQ ID NO:1 (or the appropriate amino acid positions of the alternative sequence). The polypeptide can comprise the amino acid sequence of SEQ ID NO:1 (or an alternative sequence that is the amino acid sequence set forth in SEQ ID NO:2206 or that is an amino acid sequence at least 95%, at least 96%, at least 97%, at least 98%, or at least 99% identical to the amino acid sequence set forth in SEQ ID NO:1) except that the amino acids from position 585 to 590 of SEQ ID NO:1 are replaced with the amino acid sequence of any one of SEQ ID NOs:J2-J64. The polypeptide can comprise the amino acid sequence of SEQ ID NO:1 (or an alternative sequence that is the amino acid sequence set forth in SEQ ID NO:2206 or that is an amino acid sequence at least 95%, at least 96%, at least 97%, at least 98%, or at least 99% identical to the amino acid sequence set forth in SEQ ID NO:1) except that the amino acids from position 585 to 590 of SEQ ID NO:1 are replaced with the amino acid sequence of any one of SEQ ID NOs:J62-J64. An AAV vector comprising the polypeptide can infect greater than 2 percent of ON-retinal ganglion cells of an eye when a titer of at least 1×10⁷ of the vector is administered intravitreally to the eye. An AAV vector comprising the polypeptide can express more nucleic acid in ON-retinal ganglion cells than the level of expression from a comparable AAV vector comprising a capsid polypeptide consisting of the amino acid sequence set forth in SEQ ID NO:1. The nucleic acid molecule can be DNA.

[0127] In another aspect, this document features a host cell comprising a nucleic acid molecule of either of the two preceding paragraphs. The host cell can express the vector. The host cell can express the polypeptide.

[0128] In another aspect, this document features a host cell comprising an AAV vector comprising an AAV capsid polypeptide, wherein the capsid polypeptide comprises the amino acid sequence of any one of SEQ ID NOs:J2-J64. The capsid polypeptide can comprise the amino acid sequence of SEQ ID NO:1 (or an alternative sequence that is the amino acid sequence set forth in SEQ ID NO:2206 or that is an amino acid sequence at least 95%, at least 96%, at least 97%, at least 98%, or at least 99% identical to the amino acid sequence set forth in SEQ ID NO:1) except that the amino acid sequence of any one of SEQ ID NOs:J2-J64 is located between amino acid positions 587 and 588 of SEQ ID NO:1 (or the appropriate amino acid positions of the alternative sequence). The capsid polypeptide can comprise the amino acid sequence of SEQ ID NO:1 (or an alternative sequence that is the amino acid sequence set forth in SEQ ID NO:2206 or that is an amino acid sequence at least 95%, at least 96%, at least 97%, at least 98%, or at least 99% identical to the amino acid sequence set forth in SEQ ID NO:1) except that the amino acid sequence of any one of SEQ ID NOs:J2-J61 is located between amino acid positions 587 and 588 of SEQ ID NO:1 (or the appropriate amino acid positions of the alternative sequence). The capsid polypeptide can comprise the amino acid sequence of SEQ ID NO:1 (or an alternative sequence that is the amino acid sequence set forth in SEQ ID NO:2206 or that is an amino acid sequence at least 95%, at least 96%, at least 97%, at least 98%, or at least 99% identical to the amino acid sequence set forth in SEQ ID NO:1) except that the amino acids from position 585 to 590 of SEQ ID NO:1 are replaced with the amino acid sequence of any one of SEQ ID NOs:J2-J64. The capsid polypeptide can comprise the amino acid sequence of SEQ ID NO:1 (or an alternative sequence that is the amino acid sequence set forth in SEQ ID NO:2206 or that is an amino acid sequence at least 95%, at least 96%, at least 97%, at least 98%, or at least 99% identical to the amino acid sequence set forth in SEQ ID NO:1) except that the amino acids from position 585 to 590 of SEQ ID NO:1 are replaced with the amino acid sequence of any one of SEQ ID NOs:J62-J64. The vector can be an AAV2 vector. The vector can infect greater than 2 percent of ON-retinal ganglion cells of an eye when a titer of at least 1×10⁷ of the vector is administered intravitreally to the eye. The vector can comprise an exogenous nucleic acid encoding an RNA or a polypeptide. The exogenous nucleic acid can encode an RNA. The RNA can be an siRNA or microRNA. The exogenous nucleic acid can encode a polypeptide. The polypeptide can be an ABCA4 polypeptide, a CRB1 polypeptide, an NPHP5 polypeptide, or an NR2E3 polypeptide. The vector can express more nucleic acid in ON-retinal ganglion cells than the level of expression from a comparable AAV vector comprising a capsid polypeptide consisting of the amino acid sequence set forth in SEQ ID NO:1. The host cell can be a retinal cell.

[0129] In another aspect, this document features a host cell comprising an AAV capsid polypeptide comprising the amino acid sequence of any one of SEQ ID NOs:J2-J64. The polypeptide can comprise the amino acid sequence of SEQ ID NO:1 (or an alternative sequence that is the amino acid sequence set forth in SEQ ID NO:2206 or that is an amino acid sequence at least 95%, at least 96%, at least 97%, at least 98%, or at least 99% identical to the amino acid sequence set forth in SEQ ID NO:1) except that the amino acid sequence of any one of SEQ ID NOs:J2-J64 is located between amino acid positions 587 and 588 of SEQ ID NO:1 (or the appropriate amino acid positions of the alternative sequence). The polypeptide can comprise the amino acid sequence of SEQ ID NO:1 (or an alternative sequence that is the amino acid sequence set forth in SEQ ID NO:2206 or that is an amino acid sequence at least 95%, at least 96%, at least 97%, at least 98%, or at least 99% identical to the amino acid sequence set forth in SEQ ID NO:1) except that the amino acid sequence of any one of SEQ ID NOs:J2-J61 is located between amino acid positions 587 and 588 of SEQ ID NO:1 (or the appropriate amino acid positions of the alternative sequence). The polypeptide can comprise the amino acid sequence of SEQ ID NO:1 (or an alternative sequence that is the amino acid sequence set forth in SEQ ID NO:2206 or that is an amino acid sequence at least 95%, at least 96%, at least 97%, at least 98%, or at least 99% identical to the amino acid sequence set forth in SEQ ID NO:1) except that the amino acids from position 585 to 590 of SEQ ID NO:1 are replaced with the amino acid sequence of any one of SEQ ID NOs:J2-J64. The polypeptide can comprise the amino acid sequence of SEQ ID NO:1 (or an alternative sequence that is the amino acid sequence set forth in SEQ ID NO:2206 or that is an amino acid sequence at least 95%, at least 96%, at least 97%, at least 98%, or at least 99% identical to the amino acid sequence set forth in SEQ ID NO:1) except that the amino acids from position 585 to 590 of SEQ ID NO:1 are replaced with the amino acid sequence of any one of SEQ ID NOs:J62-J64. An AAV vector comprising the polypeptide can infect greater than 2 percent of ON-retinal ganglion cells of an eye when a titer of at least 1×10⁷ of the vector is administered intravitreally to the eye. An AAV vector comprising the polypeptide can express more nucleic acid in ON-retinal ganglion cells than the level of expression from a comparable AAV vector comprising a capsid polypeptide consisting of the amino acid sequence set forth in SEQ ID NO:1. The host cell can be a retinal cell.

[0130] In another aspect, this document features a composition comprising an AAV vector comprising an AAV capsid polypeptide, wherein the capsid polypeptide comprises the amino acid sequence of any one of SEQ ID NOs:J2-J64. The capsid polypeptide can comprise the amino acid sequence of SEQ ID NO:1 (or an alternative sequence that is the amino acid sequence set forth in SEQ ID NO:2206 or that is an amino acid sequence at least 95%, at least 96%, at least 97%, at least 98%, or at least 99% identical to the amino acid sequence set forth in SEQ ID NO:1) except that the amino acid sequence of any one of SEQ ID NOs:J2-J64 is located between amino acid positions 587 and 588 of SEQ ID NO:1 (or the appropriate amino acid positions of the alternative sequence). The capsid polypeptide can comprise the amino acid sequence of SEQ ID NO:1 (or an alternative sequence that is the amino acid sequence set forth in SEQ ID NO:2206 or that is an amino acid sequence at least 95%, at least 96%, at least 97%, at least 98%, or at least 99% identical to the amino acid sequence set forth in SEQ ID NO:1) except that the amino acid sequence of any one of SEQ ID NOs:J2-J61 is located between amino acid positions 587 and 588 of SEQ ID NO:1 (or the appropriate amino acid positions of the alternative sequence). The capsid polypeptide can comprise the amino acid sequence of SEQ ID NO:1 (or an alternative sequence that is the amino acid sequence set forth in SEQ ID NO:2206 or that is an amino acid sequence at least 95%, at least 96%, at least 97%, at least 98%, or at least 99% identical to the amino acid sequence set forth in SEQ ID NO:1) except that the amino acids from position 585 to 590 of SEQ ID NO:1 are replaced with the amino acid sequence of any one of SEQ ID NOs:J2-J64. The capsid polypeptide can comprise the amino acid sequence of SEQ ID NO:1 (or an alternative sequence that is the amino acid sequence set forth in SEQ ID NO:2206 or that is an amino acid sequence at least 95%, at least 96%, at least 97%, at least 98%, or at least 99% identical to the amino acid sequence set forth in SEQ ID NO:1) except that the amino acids from position 585 to 590 of SEQ ID NO:1 are replaced with the amino acid sequence of any one of SEQ ID NOs:J62-J64. The vector can be an AAV2 vector. The vector can infect greater than 2 percent of ON-retinal ganglion cells of an eye when a titer of at least 1×10⁷ of the vector is administered intravitreally to the eye. The vector can comprise an exogenous nucleic acid encoding an RNA or a polypeptide. The exogenous nucleic acid can encode an RNA. The RNA can be an siRNA or microRNA. The exogenous nucleic acid can encode a polypeptide. The polypeptide can be an ABCA4 polypeptide, a CRB1 polypeptide, an NPHP5 polypeptide, or an NR2E3 polypeptide. The vector can express more nucleic acid in ON-retinal ganglion cells than the level of expression from a comparable AAV vector comprising a capsid polypeptide consisting of the amino acid sequence set forth in SEQ ID NO:1. The composition can comprise from about 1×10⁷ to about 1×10¹⁴ of the vector. The composition can comprise phosphate buffered saline, Hank's Balanced Salt Solution, or Pluronic F68.

[0131] In another aspect, this document features a method for delivering an exogenous nucleic acid sequence to an ON-retinal ganglion cell within a mammal. The method comprises (or consists essentially of, or consists of) contacting the ON-retinal ganglion cell with an AAV vector comprising an AAV capsid polypeptide and the exogenous nucleic acid sequence, wherein the capsid polypeptide comprises the amino acid sequence of any one of SEQ ID NOs:J2-J64, wherein the AAV vector infects the ON-retinal ganglion cell, thereby delivering the exogenous nucleic acid sequence to the ON-retinal ganglion cell. The capsid polypeptide can comprise the amino acid sequence of SEQ ID NO:1 (or an alternative sequence that is the amino acid sequence set forth in SEQ ID NO:2206 or that is an amino acid sequence at least 95%, at least 96%, at least 97%, at least 98%, or at least 99% identical to the amino acid sequence set forth in SEQ ID NO:1) except that the amino acid sequence of any one of SEQ ID NOs:J2-J64 is located between amino acid positions 587 and 588 of SEQ ID NO:1 (or the appropriate amino acid positions of the alternative sequence). The capsid polypeptide can comprise the amino acid sequence of SEQ ID NO:1 (or an alternative sequence that is the amino acid sequence set forth in SEQ ID NO:2206 or that is an amino acid sequence at least 95%, at least 96%, at least 97%, at least 98%, or at least 99% identical to the amino acid sequence set forth in SEQ ID NO:1) except that the amino acid sequence of any one of SEQ ID NOs:J2-J61 is located between amino acid positions 587 and 588 of SEQ ID NO:1 (or the appropriate amino acid positions of the alternative sequence). The capsid polypeptide can comprise the amino acid sequence of SEQ ID NO:1 (or an alternative sequence that is the amino acid sequence set forth in SEQ ID NO:2206 or that is an amino acid sequence at least 95%, at least 96%, at least 97%, at least 98%, or at least 99% identical to the amino acid sequence set forth in SEQ ID NO:1) except that the amino acids from position 585 to 590 of SEQ ID NO:1 are replaced with the amino acid sequence of any one of SEQ ID NOs:J2-J64. The capsid polypeptide can comprise the amino acid sequence of SEQ ID NO:1 (or an alternative sequence that is the amino acid sequence set forth in SEQ ID NO:2206 or that is an amino acid sequence at least 95%, at least 96%, at least 97%, at least 98%, or at least 99% identical to the amino acid sequence set forth in SEQ ID NO:1) except that the amino acids from position 585 to 590 of SEQ ID NO:1 are replaced with the amino acid sequence of any one of SEQ ID NOs:J62-J64. The mammal can be a human (or a non-human primate). The vector can be an AAV2 vector. The vector can infect greater than 2 percent of ON-retinal ganglion cells of an eye when a titer of at least 1×10⁷ of the vector is administered intravitreally to the eye. The exogenous nucleic acid sequence can encode an RNA or a polypeptide. The exogenous nucleic acid can encode an RNA. The RNA can be an siRNA or microRNA. The exogenous nucleic acid can encode a polypeptide. The polypeptide can be an ABCA4 polypeptide, a CRB1 polypeptide, an NPHP5 polypeptide, or an NR2E3 polypeptide. The vector can express more of the exogenous nucleic acid sequence in the ON-retinal ganglion cell than the level of expression in an ON-retinal ganglion cell from a comparable AAV vector comprising a capsid polypeptide consisting of the amino acid sequence set forth in SEQ ID NO:1. The method can comprise intravitreally administering a composition comprising the vector to the mammal, thereby contacting the ON-retinal ganglion cell with the vector. The composition can comprise from about 1×10⁷ to about 1×10¹⁴ of the vector.

[0132] In another aspect, this document features a method for treating a retinal condition. The method comprises (or consists essentially of, or consists of) contacting ON-retinal ganglion cells of a mammal having the retinal condition with AAV vectors comprising an AAV capsid polypeptide and an exogenous nucleic acid sequence, wherein the capsid polypeptide comprises the amino acid sequence of any one of SEQ ID NOs:J2-J64, wherein the AAV vectors infect the ON-retinal ganglion cells and drive expression of the exogenous nucleic acid sequence within the ON-retinal ganglion cells, thereby treating the retinal condition. The mammal can be a human (or a non-human primate). The retinal condition can be selected from the group consisting of cone dystrophy, cone/rod dystrophy, retinitis pigmentosa, macular degeneration, achromatopsia, blue cone monochromcy, and color blindness. The capsid polypeptide can comprise the amino acid sequence of SEQ ID NO:1 (or an alternative sequence that is the amino acid sequence set forth in SEQ ID NO:2206 or that is an amino acid sequence at least 95%, at least 96%, at least 97%, at least 98%, or at least 99% identical to the amino acid sequence set forth in SEQ ID NO:1) except that the amino acid sequence of any one of SEQ ID NOs:J2-J64 is located between amino acid positions 587 and 588 of SEQ ID NO:1 (or the appropriate amino acid positions of the alternative sequence). The capsid polypeptide can comprise the amino acid sequence of SEQ ID NO:1 (or an alternative sequence that is the amino acid sequence set forth in SEQ ID NO:2206 or that is an amino acid sequence at least 95%, at least 96%, at least 97%, at least 98%, or at least 99% identical to the amino acid sequence set forth in SEQ ID NO:1) except that the amino acid sequence of any one of SEQ ID NOs:J2-J61 is located between amino acid positions 587 and 588 of SEQ ID NO:1 (or the appropriate amino acid positions of the alternative sequence). The capsid polypeptide can comprise the amino acid sequence of SEQ ID NO:1 (or an alternative sequence that is the amino acid sequence set forth in SEQ ID NO:2206 or that is an amino acid sequence at least 95%, at least 96%, at least 97%, at least 98%, or at least 99% identical to the amino acid sequence set forth in SEQ ID NO:1) except that the amino acids from position 585 to 590 of SEQ ID NO:1 are replaced with the amino acid sequence of any one of SEQ ID NOs:J2-J64. The capsid polypeptide can comprise the amino acid sequence of SEQ ID NO:1 (or an alternative sequence that is the amino acid sequence set forth in SEQ ID NO:2206 or that is an amino acid sequence at least 95%, at least 96%, at least 97%, at least 98%, or at least 99% identical to the amino acid sequence set forth in SEQ ID NO:1) except that the amino acids from position 585 to 590 of SEQ ID NO:1 are replaced with the amino acid sequence of any one of SEQ ID NOs:J62-J64. The vectors can be AAV2 vectors. The vectors can infect greater than 2 percent of ON-retinal ganglion cells when a titer of at least 1×10⁷ of the vectors is administered intravitreally to an eye of the mammal. The exogenous nucleic acid sequence can encode an RNA. The RNA can be an siRNA or microRNA. The exogenous nucleic acid can encode a polypeptide. The polypeptide can be an ABCA4 polypeptide, a CRB1 polypeptide, an NPHP5 polypeptide, or an NR2E3 polypeptide. The vectors can express more of the exogenous nucleic acid sequence in the ON-retinal ganglion cells than the level of expression in ON-retinal ganglion cells from a comparable AAV vector comprising a capsid polypeptide consisting of the amino acid sequence set forth in SEQ ID NO:1. The method can comprise intravitreally administering a composition comprising the vectors to the mammal, thereby contacting the ON-retinal ganglion cells with the vectors. The composition can comprise from about 1×10⁷ to about 1×10¹⁴ of the vector.

[0133] In another aspect, this document features an adeno-associated virus (AAV) vector comprising an AAV capsid polypeptide, wherein the capsid polypeptide comprises the amino acid sequence of any one of SEQ ID NOs:K2-K63. The capsid polypeptide can comprise the amino acid sequence of SEQ ID NO:1 (or an alternative sequence that is the amino acid sequence set forth in SEQ ID NO:2206 or that is an amino acid sequence at least 95%, at least 96%, at least 97%, at least 98%, or at least 99% identical to the amino acid sequence set forth in SEQ ID NO:1) except that the amino acid sequence of any one of SEQ ID NOs:K2-K63 is located between amino acid positions 587 and 588 of SEQ ID NO:1 (or the appropriate amino acid positions of the alternative sequence). The capsid polypeptide can comprise the amino acid sequence of SEQ ID NO:1 (or an alternative sequence that is the amino acid sequence set forth in SEQ ID NO:2206 or that is an amino acid sequence at least 95%, at least 96%, at least 97%, at least 98%, or at least 99% identical to the amino acid sequence set forth in SEQ ID NO:1) except that the amino acid sequence of any one of SEQ ID NOs:K2-K60 is located between amino acid positions 587 and 588 of SEQ ID NO:1 (or the appropriate amino acid positions of the alternative sequence). The capsid polypeptide can comprise the amino acid sequence of SEQ ID NO:1 (or an alternative sequence that is the amino acid sequence set forth in SEQ ID NO:2206 or that is an amino acid sequence at least 95%, at least 96%, at least 97%, at least 98%, or at least 99% identical to the amino acid sequence set forth in SEQ ID NO:1) except that the amino acids from position 585 to 590 of SEQ ID NO:1 are replaced with the amino acid sequence of any one of SEQ ID NOs:K2-K63. The capsid polypeptide can comprise the amino acid sequence of SEQ ID NO:1 (or an alternative sequence that is the amino acid sequence set forth in SEQ ID NO:2206 or that is an amino acid sequence at least 95%, at least 96%, at least 97%, at least 98%, or at least 99% identical to the amino acid sequence set forth in SEQ ID NO:1) except that the amino acids from position 585 to 590 of SEQ ID NO:1 are replaced with the amino acid sequence of any one of SEQ ID NOs:K61-K63. The vector can be an AAV2 vector. The vector can infect greater than 2 percent of OFF-retinal ganglion cells of an eye when a titer of at least 1×10⁷ of the vector is administered intravitreally to the eye. The vector can comprise an exogenous nucleic acid encoding an RNA or a polypeptide. The exogenous nucleic acid can encode an RNA. The RNA can be an siRNA or microRNA. The exogenous nucleic acid can encode a polypeptide. The polypeptide can be an ABCA4 polypeptide, a CRB1 polypeptide, an NPHP5 polypeptide, or an NR2E3 polypeptide. The vector can express more nucleic acid in OFF-retinal ganglion cells than the level of expression from a comparable AAV vector comprising a capsid polypeptide consisting of the amino acid sequence set forth in SEQ ID NO:1.

[0134] In another aspect, this document features an AAV capsid polypeptide comprising the amino acid sequence of any one of SEQ ID NOs:K2-K63. The polypeptide can comprise the amino acid sequence of SEQ ID NO:1 (or an alternative sequence that is the amino acid sequence set forth in SEQ ID NO:2206 or that is an amino acid sequence at least 95%, at least 96%, at least 97%, at least 98%, or at least 99% identical to the amino acid sequence set forth in SEQ ID NO:1) except that the amino acid sequence of any one of SEQ ID NOs:K2-K63 is located between amino acid positions 587 and 588 of SEQ ID NO:1 (or the appropriate amino acid positions of the alternative sequence). The polypeptide can comprise the amino acid sequence of SEQ ID NO:1 (or an alternative sequence that is the amino acid sequence set forth in SEQ ID NO:2206 or that is an amino acid sequence at least 95%, at least 96%, at least 97%, at least 98%, or at least 99% identical to the amino acid sequence set forth in SEQ ID NO:1) except that the amino acid sequence of any one of SEQ ID NOs:K2-K60 is located between amino acid positions 587 and 588 of SEQ ID NO:1 (or the appropriate amino acid positions of the alternative sequence). The polypeptide can comprise the amino acid sequence of SEQ ID NO:1 (or an alternative sequence that is the amino acid sequence set forth in SEQ ID NO:2206 or that is an amino acid sequence at least 95%, at least 96%, at least 97%, at least 98%, or at least 99% identical to the amino acid sequence set forth in SEQ ID NO: 1) except that the amino acids from position 585 to 590 of SEQ ID NO:1 are replaced with the amino acid sequence of any one of SEQ ID NOs:K2-K63. The polypeptide can comprise the amino acid sequence of SEQ ID NO:1 (or an alternative sequence that is the amino acid sequence set forth in SEQ ID NO:2206 or that is an amino acid sequence at least 95%, at least 96%, at least 97%, at least 98%, or at least 99% identical to the amino acid sequence set forth in SEQ ID NO: 1) except that the amino acids from position 585 to 590 of SEQ ID NO:1 are replaced with the amino acid sequence of any one of SEQ ID NOs:K61-K63. An AAV vector comprising the polypeptide can infect greater than 2 percent of OFF-retinal ganglion cells of an eye when a titer of at least 1×10⁷ of the vector is administered intravitreally to the eye. An AAV vector comprising the polypeptide can express more nucleic acid in OFF-retinal ganglion cells than the level of expression from a comparable AAV vector comprising a capsid polypeptide consisting of the amino acid sequence set forth in SEQ ID NO:1.

[0135] In another aspect, this document features a nucleic acid molecule encoding an AAV vector comprising an AAV capsid polypeptide, wherein the capsid polypeptide comprises the amino acid sequence of any one of SEQ ID NOs:K2-K63. The capsid polypeptide can comprise the amino acid sequence of SEQ ID NO:1 (or an alternative sequence that is the amino acid sequence set forth in SEQ ID NO:2206 or that is an amino acid sequence at least 95%, at least 96%, at least 97%, at least 98%, or at least 99% identical to the amino acid sequence set forth in SEQ ID NO:1) except that the amino acid sequence of any one of SEQ ID NOs:K2-K63 is located between amino acid positions 587 and 588 of SEQ ID NO:1 (or the appropriate amino acid positions of the alternative sequence). The capsid polypeptide can comprise the amino acid sequence of SEQ ID NO:1 (or an alternative sequence that is the amino acid sequence set forth in SEQ ID NO:2206 or that is an amino acid sequence at least 95%, at least 96%, at least 97%, at least 98%, or at least 99% identical to the amino acid sequence set forth in SEQ ID NO:1) except that the amino acid sequence of any one of SEQ ID NOs:K2-K60 is located between amino acid positions 587 and 588 of SEQ ID NO:1 (or the appropriate amino acid positions of the alternative sequence). The capsid polypeptide can comprise the amino acid sequence of SEQ ID NO:1 (or an alternative sequence that is the amino acid sequence set forth in SEQ ID NO:2206 or that is an amino acid sequence at least 95%, at least 96%, at least 97%, at least 98%, or at least 99% identical to the amino acid sequence set forth in SEQ ID NO: 1) except that the amino acids from position 585 to 590 of SEQ ID NO:1 are replaced with the amino acid sequence of any one of SEQ ID NOs:K2-K63. The capsid polypeptide can comprise the amino acid sequence of SEQ ID NO:1 (or an alternative sequence that is the amino acid sequence set forth in SEQ ID NO:2206 or that is an amino acid sequence at least 95%, at least 96%, at least 97%, at least 98%, or at least 99% identical to the amino acid sequence set forth in SEQ ID NO:1) except that the amino acids from position 585 to 590 of SEQ ID NO: 1 are replaced with the amino acid sequence of any one of SEQ ID NOs:K61-K63. The vector can be an AAV2 vector. The vector can infect greater than 2 percent of OFF-retinal ganglion cells of an eye when a titer of at least 1×10⁷ of the vector is administered intravitreally to the eye. The vector can comprise an exogenous nucleic acid encoding an RNA or a polypeptide. The exogenous nucleic acid can encode an RNA. The RNA can be an siRNA or microRNA. The exogenous nucleic acid can encode a polypeptide. The polypeptide can be an ABCA4 polypeptide, a CRB1 polypeptide, an NPHP5 polypeptide, or an NR2E3 polypeptide. The vector can express more nucleic acid in OFF-retinal ganglion cells than the level of expression from a comparable AAV vector comprising a capsid polypeptide consisting of the amino acid sequence set forth in SEQ ID NO:1. The nucleic acid molecule can be DNA.

[0136] In another aspect, this document features a nucleic acid molecule encoding an AAV capsid polypeptide comprising the amino acid sequence of any one of SEQ ID NOs:K2-K63.

[0137] The polypeptide can comprise the amino acid sequence of SEQ ID NO:1 (or an alternative sequence that is the amino acid sequence set forth in SEQ ID NO:2206 or that is an amino acid sequence at least 95%, at least 96%, at least 97%, at least 98%, or at least 99% identical to the amino acid sequence set forth in SEQ ID NO:1) except that the amino acid sequence of any one of SEQ ID NOs:K2-K63 is located between amino acid positions 587 and 588 of SEQ ID NO:1 (or the appropriate amino acid positions of the alternative sequence). The polypeptide can comprise the amino acid sequence of SEQ ID NO:1 (or an alternative sequence that is the amino acid sequence set forth in SEQ ID NO:2206 or that is an amino acid sequence at least 95%, at least 96%, at least 97%, at least 98%, or at least 99% identical to the amino acid sequence set forth in SEQ ID NO:1) except that the amino acid sequence of any one of SEQ ID NOs:K2-K60 is located between amino acid positions 587 and 588 of SEQ ID NO:1 (or the appropriate amino acid positions of the alternative sequence). The polypeptide can comprise the amino acid sequence of SEQ ID NO:1 (or an alternative sequence that is the amino acid sequence set forth in SEQ ID NO:2206 or that is an amino acid sequence at least 95%, at least 96%, at least 97%, at least 98%, or at least 99% identical to the amino acid sequence set forth in SEQ ID NO:1) except that the amino acids from position 585 to 590 of SEQ ID NO:1 are replaced with the amino acid sequence of any one of SEQ ID NOs:K2-K63. The polypeptide can comprise the amino acid sequence of SEQ ID NO:1 (or an alternative sequence that is the amino acid sequence set forth in SEQ ID NO:2206 or that is an amino acid sequence at least 95%, at least 96%, at least 97%, at least 98%, or at least 99% identical to the amino acid sequence set forth in SEQ ID NO:1) except that the amino acids from position 585 to 590 of SEQ ID NO:1 are replaced with the amino acid sequence of any one of SEQ ID NOs:K61-K63. An AAV vector comprising the polypeptide can infect greater than 2 percent of OFF-retinal ganglion cells of an eye when a titer of at least 1×10⁷ of the vector is administered intravitreally to the eye. An AAV vector comprising the polypeptide can express more nucleic acid in OFF-retinal ganglion cells than the level of expression from a comparable AAV vector comprising a capsid polypeptide consisting of the amino acid sequence set forth in SEQ ID NO:1. The nucleic acid molecule can be DNA.

[0138] In another aspect, this document features a host cell comprising a nucleic acid molecule of either of the two preceding paragraphs. The host cell can express the vector. The host cell can express the polypeptide.

[0139] In another aspect, this document features a host cell comprising an AAV vector comprising an AAV capsid polypeptide, wherein the capsid polypeptide comprises the amino acid sequence of any one of SEQ ID NOs:K2-K63. The capsid polypeptide can comprise the amino acid sequence of SEQ ID NO:1 (or an alternative sequence that is the amino acid sequence set forth in SEQ ID NO:2206 or that is an amino acid sequence at least 95%, at least 96%, at least 97%, at least 98%, or at least 99% identical to the amino acid sequence set forth in SEQ ID NO:1) except that the amino acid sequence of any one of SEQ ID NOs:K2-K63 is located between amino acid positions 587 and 588 of SEQ ID NO:1 (or the appropriate amino acid positions of the alternative sequence). The capsid polypeptide can comprise the amino acid sequence of SEQ ID NO:1 (or an alternative sequence that is the amino acid sequence set forth in SEQ ID NO:2206 or that is an amino acid sequence at least 95%, at least 96%, at least 97%, at least 98%, or at least 99% identical to the amino acid sequence set forth in SEQ ID NO:1) except that the amino acid sequence of any one of SEQ ID NOs:K2-K60 is located between amino acid positions 587 and 588 of SEQ ID NO:1 (or the appropriate amino acid positions of the alternative sequence). The capsid polypeptide can comprise the amino acid sequence of SEQ ID NO:1 (or an alternative sequence that is the amino acid sequence set forth in SEQ ID NO:2206 or that is an amino acid sequence at least 95%, at least 96%, at least 97%, at least 98%, or at least 99% identical to the amino acid sequence set forth in SEQ ID NO:1) except that the amino acids from position 585 to 590 of SEQ ID NO:1 are replaced with the amino acid sequence of any one of SEQ ID NOs:K2-K63. The capsid polypeptide can comprise the amino acid sequence of SEQ ID NO:1 (or an alternative sequence that is the amino acid sequence set forth in SEQ ID NO:2206 or that is an amino acid sequence at least 95%, at least 96%, at least 97%, at least 98%, or at least 99% identical to the amino acid sequence set forth in SEQ ID NO:1) except that the amino acids from position 585 to 590 of SEQ ID NO:1 are replaced with the amino acid sequence of any one of SEQ ID NOs:K61-K63. The vector can be an AAV2 vector. The vector can infect greater than 2 percent of OFF-retinal ganglion cells of an eye when a titer of at least 1×10⁷ of the vector is administered intravitreally to the eye. The vector can comprise an exogenous nucleic acid encoding an RNA or a polypeptide. The exogenous nucleic acid can encode an RNA. The RNA can be an siRNA or microRNA. The exogenous nucleic acid can encode a polypeptide. The polypeptide can be an ABCA4 polypeptide, a CRB1 polypeptide, an NPHP5 polypeptide, or an NR2E3 polypeptide. The vector can express more nucleic acid in OFF-retinal ganglion cells than the level of expression from a comparable AAV vector comprising a capsid polypeptide consisting of the amino acid sequence set forth in SEQ ID NO:1. The host cell can be a retinal cell.

[0140] In another aspect, this document features a host cell comprising an AAV capsid polypeptide comprising the amino acid sequence of any one of SEQ ID NOs:K2-K63. The polypeptide can comprise the amino acid sequence of SEQ ID NO:1 (or an alternative sequence that is the amino acid sequence set forth in SEQ ID NO:2206 or that is an amino acid sequence at least 95%, at least 96%, at least 97%, at least 98%, or at least 99% identical to the amino acid sequence set forth in SEQ ID NO:1) except that the amino acid sequence of any one of SEQ ID NOs:K2-K63 is located between amino acid positions 587 and 588 of SEQ ID NO:1 (or the appropriate amino acid positions of the alternative sequence). The polypeptide can comprise the amino acid sequence of SEQ ID NO:1 (or an alternative sequence that is the amino acid sequence set forth in SEQ ID NO:2206 or that is an amino acid sequence at least 95%, at least 96%, at least 97%, at least 98%, or at least 99% identical to the amino acid sequence set forth in SEQ ID NO:1) except that the amino acid sequence of any one of SEQ ID NOs:K2-K60 is located between amino acid positions 587 and 588 of SEQ ID NO:1 (or the appropriate amino acid positions of the alternative sequence). The polypeptide can comprise the amino acid sequence of SEQ ID NO:1 (or an alternative sequence that is the amino acid sequence set forth in SEQ ID NO:2206 or that is an amino acid sequence at least 95%, at least 96%, at least 97%, at least 98%, or at least 99% identical to the amino acid sequence set forth in SEQ ID NO:1) except that the amino acids from position 585 to 590 of SEQ ID NO:1 are replaced with the amino acid sequence of any one of SEQ ID NOs:K2-K63. The polypeptide can comprise the amino acid sequence of SEQ ID NO:1 (or an alternative sequence that is the amino acid sequence set forth in SEQ ID NO:2206 or that is an amino acid sequence at least 95%, at least 96%, at least 97%, at least 98%, or at least 99% identical to the amino acid sequence set forth in SEQ ID NO:1) except that the amino acids from position 585 to 590 of SEQ ID NO:1 are replaced with the amino acid sequence of any one of SEQ ID NOs:K61-K63. An AAV vector comprising the polypeptide can infect greater than 2 percent of OFF-retinal ganglion cells of an eye when a titer of at least 1×10⁷ of the vector is administered intravitreally to the eye. An AAV vector comprising the polypeptide can express more nucleic acid in OFF-retinal ganglion cells than the level of expression from a comparable AAV vector comprising a capsid polypeptide consisting of the amino acid sequence set forth in SEQ ID NO:1. The host cell can be a retinal cell.

[0141] In another aspect, this document features a composition comprising an AAV vector comprising an AAV capsid polypeptide, wherein the capsid polypeptide comprises the amino acid sequence of any one of SEQ ID NOs:K2-K63. The capsid polypeptide can comprise the amino acid sequence of SEQ ID NO:1 (or an alternative sequence that is the amino acid sequence set forth in SEQ ID NO:2206 or that is an amino acid sequence at least 95%, at least 96%, at least 97%, at least 98%, or at least 99% identical to the amino acid sequence set forth in SEQ ID NO:1) except that the amino acid sequence of any one of SEQ ID NOs:K2-K63 is located between amino acid positions 587 and 588 of SEQ ID NO:1 (or the appropriate amino acid positions of the alternative sequence). The capsid polypeptide can comprise the amino acid sequence of SEQ ID NO:1 (or an alternative sequence that is the amino acid sequence set forth in SEQ ID NO:2206 or that is an amino acid sequence at least 95%, at least 96%, at least 97%, at least 98%, or at least 99% identical to the amino acid sequence set forth in SEQ ID NO:1) except that the amino acid sequence of any one of SEQ ID NOs:K2-K60 is located between amino acid positions 587 and 588 of SEQ ID NO:1 (or the appropriate amino acid positions of the alternative sequence). The capsid polypeptide can comprise the amino acid sequence of SEQ ID NO:1 (or an alternative sequence that is the amino acid sequence set forth in SEQ ID NO:2206 or that is an amino acid sequence at least 95%, at least 96%, at least 97%, at least 98%, or at least 99% identical to the amino acid sequence set forth in SEQ ID NO:1) except that the amino acids from position 585 to 590 of SEQ ID NO:1 are replaced with the amino acid sequence of any one of SEQ ID NOs:K2-K63. The capsid polypeptide can comprise the amino acid sequence of SEQ ID NO:1 (or an alternative sequence that is the amino acid sequence set forth in SEQ ID NO:2206 or that is an amino acid sequence at least 95%, at least 96%, at least 97%, at least 98%, or at least 99% identical to the amino acid sequence set forth in SEQ ID NO:1) except that the amino acids from position 585 to 590 of SEQ ID NO:1 are replaced with the amino acid sequence of any one of SEQ ID NOs:K61-K63. The vector can be an AAV2 vector. The vector can infect greater than 2 percent of OFF-retinal ganglion cells of an eye when a titer of at least 1×10⁷ of the vector is administered intravitreally to the eye. The vector can comprise an exogenous nucleic acid encoding an RNA or a polypeptide. The exogenous nucleic acid can encode an RNA. The RNA can be an siRNA or microRNA. The exogenous nucleic acid can encode a polypeptide. The polypeptide can be an ABCA4 polypeptide, a CRB1 polypeptide, an NPHP5 polypeptide, or an NR2E3 polypeptide. The vector can express more nucleic acid in OFF-retinal ganglion cells than the level of expression from a comparable AAV vector comprising a capsid polypeptide consisting of the amino acid sequence set forth in SEQ ID NO:1. The composition can comprise from about 1×10⁷ to about 1×10¹⁴ of the vector. The composition can comprise phosphate buffered saline, Hank's Balanced Salt Solution, or Pluronic F68.

[0142] In another aspect, this document features a method for delivering an exogenous nucleic acid sequence to an OFF-retinal ganglion cell within a mammal. The method comprises (or consists essentially of, or consists of) contacting the OFF-retinal ganglion cell with an AAV vector comprising an AAV capsid polypeptide and the exogenous nucleic acid sequence, wherein the capsid polypeptide comprises the amino acid sequence of any one of SEQ ID NOs:K2-K63, wherein the AAV vector infects the OFF-retinal ganglion cell, thereby delivering the exogenous nucleic acid sequence to the OFF-retinal ganglion cell. The capsid polypeptide can comprise the amino acid sequence of SEQ ID NO:1 (or an alternative sequence that is the amino acid sequence set forth in SEQ ID NO:2206 or that is an amino acid sequence at least 95%, at least 96%, at least 97%, at least 98%, or at least 99% identical to the amino acid sequence set forth in SEQ ID NO:1) except that the amino acid sequence of any one of SEQ ID NOs:K2-K63 is located between amino acid positions 587 and 588 of SEQ ID NO:1 (or the appropriate amino acid positions of the alternative sequence). The capsid polypeptide can comprise the amino acid sequence of SEQ ID NO:1 (or an alternative sequence that is the amino acid sequence set forth in SEQ ID NO:2206 or that is an amino acid sequence at least 95%, at least 96%, at least 97%, at least 98%, or at least 99% identical to the amino acid sequence set forth in SEQ ID NO:1) except that the amino acid sequence of any one of SEQ ID NOs:K2-K60 is located between amino acid positions 587 and 588 of SEQ ID NO:1 (or the appropriate amino acid positions of the alternative sequence). The capsid polypeptide can comprise the amino acid sequence of SEQ ID NO:1 (or an alternative sequence that is the amino acid sequence set forth in SEQ ID NO:2206 or that is an amino acid sequence at least 95%, at least 96%, at least 97%, at least 98%, or at least 99% identical to the amino acid sequence set forth in SEQ ID NO:1) except that the amino acids from position 585 to 590 of SEQ ID NO:1 are replaced with the amino acid sequence of any one of SEQ ID NOs:K2-K63. The capsid polypeptide can comprise the amino acid sequence of SEQ ID NO:1 (or an alternative sequence that is the amino acid sequence set forth in SEQ ID NO:2206 or that is an amino acid sequence at least 95%, at least 96%, at least 97%, at least 98%, or at least 99% identical to the amino acid sequence set forth in SEQ ID NO:1) except that the amino acids from position 585 to 590 of SEQ ID NO:1 are replaced with the amino acid sequence of any one of SEQ ID NOs:K61-K63. The mammal can be a human (or a non-human primate). The vector can be an AAV2 vector. The vector can infect greater than 2 percent of OFF-retinal ganglion cells of an eye when a titer of at least 1×10⁷ of the vector is administered intravitreally to the eye. The exogenous nucleic acid sequence can encode an RNA or a polypeptide. The exogenous nucleic acid can encode an RNA. The RNA can be an siRNA or microRNA. The exogenous nucleic acid can encode a polypeptide. The polypeptide can be an ABCA4 polypeptide, a CRB1 polypeptide, an NPHP5 polypeptide, or an NR2E3 polypeptide. The vector can express more of the exogenous nucleic acid sequence in the OFF-retinal ganglion cell than the level of expression in an OFF-retinal ganglion cell from a comparable AAV vector comprising a capsid polypeptide consisting of the amino acid sequence set forth in SEQ ID NO:1. The method can comprise intravitreally administering a composition comprising the vector to the mammal, thereby contacting the OFF-retinal ganglion cell with the vector. The composition can comprise from about 1×10⁷ to about 1×10¹⁴ of the vector.

[0143] In another aspect, this document features a method for treating a retinal condition. The method comprises (or consists essentially of, or consists of) contacting OFF-retinal ganglion cells of a mammal having the retinal condition with AAV vectors comprising an AAV capsid polypeptide and an exogenous nucleic acid sequence, wherein the capsid polypeptide comprises the amino acid sequence of any one of SEQ ID NOs:K2-K63, wherein the AAV vectors infect the OFF-retinal ganglion cells and drive expression of the exogenous nucleic acid sequence within the OFF-retinal ganglion cells, thereby treating the retinal condition. The mammal can be a human (or a non-human primate). The retinal condition can be selected from the group consisting of cone dystrophy, cone/rod dystrophy, retinitis pigmentosa, macular degeneration, achromatopsia, blue cone monochromcy, and color blindness. The capsid polypeptide can comprise the amino acid sequence of SEQ ID NO:1 (or an alternative sequence that is the amino acid sequence set forth in SEQ ID NO:2206 or that is an amino acid sequence at least 95%, at least 96%, at least 97%, at least 98%, or at least 99% identical to the amino acid sequence set forth in SEQ ID NO:1) except that the amino acid sequence of any one of SEQ ID NOs:K2-K63 is located between amino acid positions 587 and 588 of SEQ ID NO:1 (or the appropriate amino acid positions of the alternative sequence). The capsid polypeptide can comprise the amino acid sequence of SEQ ID NO:1 (or an alternative sequence that is the amino acid sequence set forth in SEQ ID NO:2206 or that is an amino acid sequence at least 95%, at least 96%, at least 97%, at least 98%, or at least 99% identical to the amino acid sequence set forth in SEQ ID NO:1) except that the amino acid sequence of any one of SEQ ID NOs:K2-K60 is located between amino acid positions 587 and 588 of SEQ ID NO:1 (or the appropriate amino acid positions of the alternative sequence). The capsid polypeptide can comprise the amino acid sequence of SEQ ID NO:1 (or an alternative sequence that is the amino acid sequence set forth in SEQ ID NO:2206 or that is an amino acid sequence at least 95%, at least 96%, at least 97%, at least 98%, or at least 99% identical to the amino acid sequence set forth in SEQ ID NO:1) except that the amino acids from position 585 to 590 of SEQ ID NO:1 are replaced with the amino acid sequence of any one of SEQ ID NOs:K2-K63. The capsid polypeptide can comprise the amino acid sequence of SEQ ID NO:1 (or an alternative sequence that is the amino acid sequence set forth in SEQ ID NO:2206 or that is an amino acid sequence at least 95%, at least 96%, at least 97%, at least 98%, or at least 99% identical to the amino acid sequence set forth in SEQ ID NO:1) except that the amino acids from position 585 to 590 of SEQ ID NO:1 are replaced with the amino acid sequence of any one of SEQ ID NOs:K61-K63. The vectors can be AAV2 vectors. The vectors can infect greater than 2 percent of OFF-retinal ganglion cells when a titer of at least 1×10⁷ of the vectors is administered intravitreally to an eye of the mammal. The exogenous nucleic acid sequence can encode an RNA. The RNA can be an siRNA or microRNA. The exogenous nucleic acid can encode a polypeptide. The polypeptide can be an ABCA4 polypeptide, a CRB1 polypeptide, an NPHP5 polypeptide, or an NR2E3 polypeptide. The vectors can express more of the exogenous nucleic acid sequence in the OFF-retinal ganglion cells than the level of expression in OFF-retinal ganglion cells from a comparable AAV vector comprising a capsid polypeptide consisting of the amino acid sequence set forth in SEQ ID NO:1. The method can comprise intravitreally administering a composition comprising the vectors to the mammal, thereby contacting the OFF-retinal ganglion cells with the vectors. The composition can comprise from about 1×10⁷ to about 1×10¹⁴ of the vector.

[0144] In another aspect, this document features an adeno-associated virus (AAV) vector comprising an AAV capsid polypeptide, wherein the capsid polypeptide comprises the amino acid sequence of any one of SEQ ID NOs:L2-L27. The capsid polypeptide can comprise the amino acid sequence of SEQ ID NO:1 (or an alternative sequence that is the amino acid sequence set forth in SEQ ID NO:2206 or that is an amino acid sequence at least 95%, at least 96%, at least 97%, at least 98%, or at least 99% identical to the amino acid sequence set forth in SEQ ID NO:1) except that the amino acid sequence of any one of SEQ ID NOs:L2-L27 is located between amino acid positions 587 and 588 of SEQ ID NO:1 (or the appropriate amino acid positions of the alternative sequence). The capsid polypeptide can comprise the amino acid sequence of SEQ ID NO:1 (or an alternative sequence that is the amino acid sequence set forth in SEQ ID NO:2206 or that is an amino acid sequence at least 95%, at least 96%, at least 97%, at least 98%, or at least 99% identical to the amino acid sequence set forth in SEQ ID NO:1) except that the amino acid sequence of any one of SEQ ID NOs:L2-L19 is located between amino acid positions 587 and 588 of SEQ ID NO:1 (or the appropriate amino acid positions of the alternative sequence). The capsid polypeptide can comprise the amino acid sequence of SEQ ID NO:1 (or an alternative sequence that is the amino acid sequence set forth in SEQ ID NO:2206 or that is an amino acid sequence at least 95%, at least 96%, at least 97%, at least 98%, or at least 99% identical to the amino acid sequence set forth in SEQ ID NO:1) except that the amino acids from position 585 to 590 of SEQ ID NO:1 are replaced with the amino acid sequence of any one of SEQ ID NOs:L2-L27. The capsid polypeptide can comprise the amino acid sequence of SEQ ID NO:1 (or an alternative sequence that is the amino acid sequence set forth in SEQ ID NO:2206 or that is an amino acid sequence at least 95%, at least 96%, at least 97%, at least 98%, or at least 99% identical to the amino acid sequence set forth in SEQ ID NO:1) except that the amino acids from position 585 to 590 of SEQ ID NO:1 are replaced with the amino acid sequence of any one of SEQ ID NOs:L20-L27. The vector can be an AAV2 vector. The vector can have a packaging efficiency greater than that of a comparable AAV vector comprising a capsid polypeptide consisting of the amino acid sequence set forth in SEQ ID NO:1. The vector can comprise an exogenous nucleic acid encoding an RNA or a polypeptide. The exogenous nucleic acid can encode an RNA. The RNA can be an siRNA or microRNA. The exogenous nucleic acid can encode a polypeptide. The polypeptide can be an ABCA4 polypeptide, a CRB1 polypeptide, an NPHP5 polypeptide, or an NR2E3 polypeptide. The vector can have a packaging efficiency at least 10 percent greater than that of a comparable AAV vector comprising a capsid polypeptide consisting of the amino acid sequence set forth in SEQ ID NO:1.

[0145] In another aspect, this document features an AAV capsid polypeptide comprising the amino acid sequence of any one of SEQ ID NOs:L2-L27. The polypeptide can comprise the amino acid sequence of SEQ ID NO:1 (or an alternative sequence that is the amino acid sequence set forth in SEQ ID NO:2206 or that is an amino acid sequence at least 95%, at least 96%, at least 97%, at least 98%, or at least 99% identical to the amino acid sequence set forth in SEQ ID NO:1) except that the amino acid sequence of any one of SEQ ID NOs:L2-L27 is located between amino acid positions 587 and 588 of SEQ ID NO:1 (or the appropriate amino acid positions of the alternative sequence). The polypeptide can comprise the amino acid sequence of SEQ ID NO:1 (or an alternative sequence that is the amino acid sequence set forth in SEQ ID NO:2206 or that is an amino acid sequence at least 95%, at least 96%, at least 97%, at least 98%, or at least 99% identical to the amino acid sequence set forth in SEQ ID NO:1) except that the amino acid sequence of any one of SEQ ID NOs:L2-L19 is located between amino acid positions 587 and 588 of SEQ ID NO:1 (or the appropriate amino acid positions of the alternative sequence). The polypeptide can comprise the amino acid sequence of SEQ ID NO:1 (or an alternative sequence that is the amino acid sequence set forth in SEQ ID NO:2206 or that is an amino acid sequence at least 95%, at least 96%, at least 97%, at least 98%, or at least 99% identical to the amino acid sequence set forth in SEQ ID NO: 1) except that the amino acids from position 585 to 590 of SEQ ID NO:1 are replaced with the amino acid sequence of any one of SEQ ID NOs:L2-L27. The polypeptide can comprise the amino acid sequence of SEQ ID NO:1 (or an alternative sequence that is the amino acid sequence set forth in SEQ ID NO:2206 or that is an amino acid sequence at least 95%, at least 96%, at least 97%, at least 98%, or at least 99% identical to the amino acid sequence set forth in SEQ ID NO: 1) except that the amino acids from position 585 to 590 of SEQ ID NO:1 are replaced with the amino acid sequence of any one of SEQ ID NOs:L20-L27. The vector can have a packaging efficiency greater than that of a comparable AAV vector comprising a capsid polypeptide consisting of the amino acid sequence set forth in SEQ ID NO:1. The vector can have a packaging efficiency at least 10 percent greater than that of a comparable AAV vector comprising a capsid polypeptide consisting of the amino acid sequence set forth in SEQ ID NO:1.

[0146] In another aspect, this document features a nucleic acid molecule encoding an AAV vector comprising an AAV capsid polypeptide, wherein the capsid polypeptide comprises the amino acid sequence of any one of SEQ ID NOs:L2-L27. The capsid polypeptide can comprise the amino acid sequence of SEQ ID NO:1 (or an alternative sequence that is the amino acid sequence set forth in SEQ ID NO:2206 or that is an amino acid sequence at least 95%, at least 96%, at least 97%, at least 98%, or at least 99% identical to the amino acid sequence set forth in SEQ ID NO:1) except that the amino acid sequence of any one of SEQ ID NOs:L2-L27 is located between amino acid positions 587 and 588 of SEQ ID NO:1 (or the appropriate amino acid positions of the alternative sequence). The capsid polypeptide can comprise the amino acid sequence of SEQ ID NO:1 (or an alternative sequence that is the amino acid sequence set forth in SEQ ID NO:2206 or that is an amino acid sequence at least 95%, at least 96%, at least 97%, at least 98%, or at least 99% identical to the amino acid sequence set forth in SEQ ID NO:1) except that the amino acid sequence of any one of SEQ ID NOs:L2-L19 is located between amino acid positions 587 and 588 of SEQ ID NO:1 (or the appropriate amino acid positions of the alternative sequence). The capsid polypeptide can comprise the amino acid sequence of SEQ ID NO:1 (or an alternative sequence that is the amino acid sequence set forth in SEQ ID NO:2206 or that is an amino acid sequence at least 95%, at least 96%, at least 97%, at least 98%, or at least 99% identical to the amino acid sequence set forth in SEQ ID NO:1) except that the amino acids from position 585 to 590 of SEQ ID NO:1 are replaced with the amino acid sequence of any one of SEQ ID NOs:L2-L27. The capsid polypeptide can comprise the amino acid sequence of SEQ ID NO:1 (or an alternative sequence that is the amino acid sequence set forth in SEQ ID NO:2206 or that is an amino acid sequence at least 95%, at least 96%, at least 97%, at least 98%, or at least 99% identical to the amino acid sequence set forth in SEQ ID NO:1) except that the amino acids from position 585 to 590 of SEQ ID NO:1 are replaced with the amino acid sequence of any one of SEQ ID NOs:L20-L27. The vector can be an AAV2 vector. The vector can have a packaging efficiency greater than that of a comparable AAV vector comprising a capsid polypeptide consisting of the amino acid sequence set forth in SEQ ID NO:1. The vector can comprise an exogenous nucleic acid encoding an RNA or a polypeptide. The exogenous nucleic acid can encode an RNA. The RNA can be an siRNA or microRNA. The exogenous nucleic acid can encode a polypeptide. The polypeptide can be an ABCA4 polypeptide, a CRB1 polypeptide, an NPHP5 polypeptide, or an NR2E3 polypeptide. The vector can have a packaging efficiency at least 10 percent greater than that of a comparable AAV vector comprising a capsid polypeptide consisting of the amino acid sequence set forth in SEQ ID NO:1. The nucleic acid molecule can be DNA.

[0147] In another aspect, this document features a nucleic acid molecule encoding an AAV capsid polypeptide comprising the amino acid sequence of any one of SEQ ID NOs:L2-L27. The polypeptide can comprise the amino acid sequence of SEQ ID NO:1 (or an alternative sequence that is the amino acid sequence set forth in SEQ ID NO:2206 or that is an amino acid sequence at least 95%, at least 96%, at least 97%, at least 98%, or at least 99% identical to the amino acid sequence set forth in SEQ ID NO:1) except that the amino acid sequence of any one of SEQ ID NOs:L2-L27 is located between amino acid positions 587 and 588 of SEQ ID NO:1 (or the appropriate amino acid positions of the alternative sequence). The polypeptide can comprise the amino acid sequence of SEQ ID NO:1 (or an alternative sequence that is the amino acid sequence set forth in SEQ ID NO:2206 or that is an amino acid sequence at least 95%, at least 96%, at least 97%, at least 98%, or at least 99% identical to the amino acid sequence set forth in SEQ ID NO:1) except that the amino acid sequence of any one of SEQ ID NOs:L2-L19 is located between amino acid positions 587 and 588 of SEQ ID NO:1 (or the appropriate amino acid positions of the alternative sequence). The polypeptide can comprise the amino acid sequence of SEQ ID NO:1 (or an alternative sequence that is the amino acid sequence set forth in SEQ ID NO:2206 or that is an amino acid sequence at least 95%, at least 96%, at least 97%, at least 98%, or at least 99% identical to the amino acid sequence set forth in SEQ ID NO:1) except that the amino acids from position 585 to 590 of SEQ ID NO:1 are replaced with the amino acid sequence of any one of SEQ ID NOs:L2-L27. The polypeptide can comprise the amino acid sequence of SEQ ID NO:1 (or an alternative sequence that is the amino acid sequence set forth in SEQ ID NO:2206 or that is an amino acid sequence at least 95%, at least 96%, at least 97%, at least 98%, or at least 99% identical to the amino acid sequence set forth in SEQ ID NO:1) except that the amino acids from position 585 to 590 of SEQ ID NO:1 are replaced with the amino acid sequence of any one of SEQ ID NOs:L20-L27. The vector can have a packaging efficiency greater than that of a comparable AAV vector comprising a capsid polypeptide consisting of the amino acid sequence set forth in SEQ ID NO:1. The vector can have a packaging efficiency at least 10 percent greater than that of a comparable AAV vector comprising a capsid polypeptide consisting of the amino acid sequence set forth in SEQ ID NO:1. The nucleic acid molecule can be DNA.

[0148] In another aspect, this document features a host cell comprising a nucleic acid molecule of either of the two preceding paragraphs. The host cell can express the vector. The host cell can express the polypeptide.

[0149] In another aspect, this document features a host cell comprising an AAV vector comprising an AAV capsid polypeptide, wherein the capsid polypeptide comprises the amino acid sequence of any one of SEQ ID NOs:L2-L27. The capsid polypeptide can comprise the amino acid sequence of SEQ ID NO:1 (or an alternative sequence that is the amino acid sequence set forth in SEQ ID NO:2206 or that is an amino acid sequence at least 95%, at least 96%, at least 97%, at least 98%, or at least 99% identical to the amino acid sequence set forth in SEQ ID NO:1) except that the amino acid sequence of any one of SEQ ID NOs:L2-L27 is located between amino acid positions 587 and 588 of SEQ ID NO:1 (or the appropriate amino acid positions of the alternative sequence). The capsid polypeptide can comprise the amino acid sequence of SEQ ID NO:1 (or an alternative sequence that is the amino acid sequence set forth in SEQ ID NO:2206 or that is an amino acid sequence at least 95%, at least 96%, at least 97%, at least 98%, or at least 99% identical to the amino acid sequence set forth in SEQ ID NO:1) except that the amino acid sequence of any one of SEQ ID NOs:L2-L19 is located between amino acid positions 587 and 588 of SEQ ID NO:1 (or the appropriate amino acid positions of the alternative sequence). The capsid polypeptide can comprise the amino acid sequence of SEQ ID NO:1 (or an alternative sequence that is the amino acid sequence set forth in SEQ ID NO:2206 or that is an amino acid sequence at least 95%, at least 96%, at least 97%, at least 98%, or at least 99% identical to the amino acid sequence set forth in SEQ ID NO:1) except that the amino acids from position 585 to 590 of SEQ ID NO:1 are replaced with the amino acid sequence of any one of SEQ ID NOs:L2-L27. The capsid polypeptide can comprise the amino acid sequence of SEQ ID NO:1 (or an alternative sequence that is the amino acid sequence set forth in SEQ ID NO:2206 or that is an amino acid sequence at least 95%, at least 96%, at least 97%, at least 98%, or at least 99% identical to the amino acid sequence set forth in SEQ ID NO:1) except that the amino acids from position 585 to 590 of SEQ ID NO:1 are replaced with the amino acid sequence of any one of SEQ ID NOs:L20-L27. The vector can be an AAV2 vector. The vector can have a packaging efficiency greater than that of a comparable AAV vector comprising a capsid polypeptide consisting of the amino acid sequence set forth in SEQ ID NO:1. The vector can comprise an exogenous nucleic acid encoding an RNA or a polypeptide. The exogenous nucleic acid can encode an RNA. The RNA can be an siRNA or microRNA. The exogenous nucleic acid can encode a polypeptide. The polypeptide can be an ABCA4 polypeptide, a CRB1 polypeptide, an NPHP5 polypeptide, or an NR2E3 polypeptide. The vector can have a packaging efficiency at least 10 percent greater than that of a comparable AAV vector comprising a capsid polypeptide consisting of the amino acid sequence set forth in SEQ ID NO:1. The host cell can be a retinal cell.

[0150] In another aspect, this document features a host cell comprising an AAV capsid polypeptide comprising the amino acid sequence of any one of SEQ ID NOs:L2-L27. The polypeptide can comprise the amino acid sequence of SEQ ID NO:1 (or an alternative sequence that is the amino acid sequence set forth in SEQ ID NO:2206 or that is an amino acid sequence at least 95%, at least 96%, at least 97%, at least 98%, or at least 99% identical to the amino acid sequence set forth in SEQ ID NO:1) except that the amino acid sequence of any one of SEQ ID NOs:L2-L27 is located between amino acid positions 587 and 588 of SEQ ID NO:1 (or the appropriate amino acid positions of the alternative sequence). The polypeptide can comprise the amino acid sequence of SEQ ID NO:1 (or an alternative sequence that is the amino acid sequence set forth in SEQ ID NO:2206 or that is an amino acid sequence at least 95%, at least 96%, at least 97%, at least 98%, or at least 99% identical to the amino acid sequence set forth in SEQ ID NO:1) except that the amino acid sequence of any one of SEQ ID NOs:L2-L19 is located between amino acid positions 587 and 588 of SEQ ID NO:1 (or the appropriate amino acid positions of the alternative sequence). The polypeptide can comprise the amino acid sequence of SEQ ID NO:1 (or an alternative sequence that is the amino acid sequence set forth in SEQ ID NO:2206 or that is an amino acid sequence at least 95%, at least 96%, at least 97%, at least 98%, or at least 99% identical to the amino acid sequence set forth in SEQ ID NO:1) except that the amino acids from position 585 to 590 of SEQ ID NO:1 are replaced with the amino acid sequence of any one of SEQ ID NOs:L2-L27. The polypeptide can comprise the amino acid sequence of SEQ ID NO:1 (or an alternative sequence that is the amino acid sequence set forth in SEQ ID NO:2206 or that is an amino acid sequence at least 95%, at least 96%, at least 97%, at least 98%, or at least 99% identical to the amino acid sequence set forth in SEQ ID NO:1) except that the amino acids from position 585 to 590 of SEQ ID NO:1 are replaced with the amino acid sequence of any one of SEQ ID NOs:L20-L27. The vector can have a packaging efficiency greater than that of a comparable AAV vector comprising a capsid polypeptide consisting of the amino acid sequence set forth in SEQ ID NO:1. The vector can have a packaging efficiency at least 10 percent greater than that of a comparable AAV vector comprising a capsid polypeptide consisting of the amino acid sequence set forth in SEQ ID NO: 1. The host cell can be a retinal cell.

[0151] In another aspect, this document features a composition comprising an AAV vector comprising an AAV capsid polypeptide, wherein the capsid polypeptide comprises the amino acid sequence of any one of SEQ ID NOs:L2-L27. The capsid polypeptide can comprise the amino acid sequence of SEQ ID NO:1 (or an alternative sequence that is the amino acid sequence set forth in SEQ ID NO:2206 or that is an amino acid sequence at least 95%, at least 96%, at least 97%, at least 98%, or at least 99% identical to the amino acid sequence set forth in SEQ ID NO:1) except that the amino acid sequence of any one of SEQ ID NOs:L2-L27 is located between amino acid positions 587 and 588 of SEQ ID NO:1 (or the appropriate amino acid positions of the alternative sequence). The capsid polypeptide can comprise the amino acid sequence of SEQ ID NO:1 (or an alternative sequence that is the amino acid sequence set forth in SEQ ID NO:2206 or that is an amino acid sequence at least 95%, at least 96%, at least 97%, at least 98%, or at least 99% identical to the amino acid sequence set forth in SEQ ID NO: 1) except that the amino acid sequence of any one of SEQ ID NOs:L2-L19 is located between amino acid positions 587 and 588 of SEQ ID NO:1 (or the appropriate amino acid positions of the alternative sequence). The capsid polypeptide can comprise the amino acid sequence of SEQ ID NO:1 (or an alternative sequence that is the amino acid sequence set forth in SEQ ID NO:2206 or that is an amino acid sequence at least 95%, at least 96%, at least 97%, at least 98%, or at least 99% identical to the amino acid sequence set forth in SEQ ID NO:1) except that the amino acids from position 585 to 590 of SEQ ID NO:1 are replaced with the amino acid sequence of any one of SEQ ID NOs:L2-L27. The capsid polypeptide can comprise the amino acid sequence of SEQ ID NO:1 (or an alternative sequence that is the amino acid sequence set forth in SEQ ID NO:2206 or that is an amino acid sequence at least 95%, at least 96%, at least 97%, at least 98%, or at least 99% identical to the amino acid sequence set forth in SEQ ID NO:1) except that the amino acids from position 585 to 590 of SEQ ID NO:1 are replaced with the amino acid sequence of any one of SEQ ID NOs:L20-L27. The vector can be an AAV2 vector. The vector can have a packaging efficiency greater than that of a comparable AAV vector comprising a capsid polypeptide consisting of the amino acid sequence set forth in SEQ ID NO:1. The vector can comprise an exogenous nucleic acid encoding an RNA or a polypeptide. The exogenous nucleic acid can encode an RNA. The RNA can be an siRNA or microRNA. The exogenous nucleic acid can encode a polypeptide. The polypeptide can be an ABCA4 polypeptide, a CRB1 polypeptide, an NPHP5 polypeptide, or an NR2E3 polypeptide. The vector can have a packaging efficiency at least 10 percent greater than that of a comparable AAV vector comprising a capsid polypeptide consisting of the amino acid sequence set forth in SEQ ID NO:1. The composition can comprise from about 1×10¹⁴ to about 1×10¹⁴ of the vector. The composition can comprise phosphate buffered saline, Hank's Balanced Salt Solution, or Pluronic F68.

[0152] In another aspect, this document features a method for delivering an exogenous nucleic acid sequence to a cell within a mammal. The method comprises (or consists essentially of, or consists of) contacting the cell with an AAV vector comprising an AAV capsid polypeptide and the exogenous nucleic acid sequence, wherein the capsid polypeptide comprises the amino acid sequence of any one of SEQ ID NOs:L2-L27, wherein the AAV vector infects the cell, thereby delivering the exogenous nucleic acid sequence to the cell. The capsid polypeptide can comprise the amino acid sequence of SEQ ID NO:1 (or an alternative sequence that is the amino acid sequence set forth in SEQ ID NO:2206 or that is an amino acid sequence at least 95%, at least 96%, at least 97%, at least 98%, or at least 99% identical to the amino acid sequence set forth in SEQ ID NO:1) except that the amino acid sequence of any one of SEQ ID NOs:L2-L27 is located between amino acid positions 587 and 588 of SEQ ID NO:1 (or the appropriate amino acid positions of the alternative sequence). The capsid polypeptide can comprise the amino acid sequence of SEQ ID NO:1 (or an alternative sequence that is the amino acid sequence set forth in SEQ ID NO:2206 or that is an amino acid sequence at least 95%, at least 96%, at least 97%, at least 98%, or at least 99% identical to the amino acid sequence set forth in SEQ ID NO:1) except that the amino acid sequence of any one of SEQ ID NOs:L2-L19 is located between amino acid positions 587 and 588 of SEQ ID NO:1 (or the appropriate amino acid positions of the alternative sequence). The capsid polypeptide can comprise the amino acid sequence of SEQ ID NO:1 (or an alternative sequence that is the amino acid sequence set forth in SEQ ID NO:2206 or that is an amino acid sequence at least 95%, at least 96%, at least 97%, at least 98%, or at least 99% identical to the amino acid sequence set forth in SEQ ID NO:1) except that the amino acids from position 585 to 590 of SEQ ID NO:1 are replaced with the amino acid sequence of any one of SEQ ID NOs:L2-L27. The capsid polypeptide can comprise the amino acid sequence of SEQ ID NO:1 (or an alternative sequence that is the amino acid sequence set forth in SEQ ID NO:2206 or that is an amino acid sequence at least 95%, at least 96%, at least 97%, at least 98%, or at least 99% identical to the amino acid sequence set forth in SEQ ID NO:1) except that the amino acids from position 585 to 590 of SEQ ID NO:1 are replaced with the amino acid sequence of any one of SEQ ID NOs:L20-L27. The mammal can be a human (or a non-human primate). The vector can be an AAV2 vector. The vector can have a packaging efficiency greater than that of a comparable AAV vector comprising a capsid polypeptide consisting of the amino acid sequence set forth in SEQ ID NO:1. The exogenous nucleic acid sequence can encode an RNA or a polypeptide. The exogenous nucleic acid can encode an RNA. The RNA can be an siRNA or microRNA. The exogenous nucleic acid can encode a polypeptide. The polypeptide can be an ABCA4 polypeptide, a CRB1 polypeptide, an NPHP5 polypeptide, or an NR2E3 polypeptide. The vector can have a packaging efficiency at least 10 percent greater than that of a comparable AAV vector comprising a capsid polypeptide consisting of the amino acid sequence set forth in SEQ ID NO: 1. The method can comprise intravitreally administering a composition comprising the vector to the mammal, thereby contacting the cell with the vector. The composition can comprise from about 1×10⁷ to about 1×10¹⁴ of the vector.

[0153] In another aspect, this document features a method for treating a retinal condition. The method comprises (or consists essentially of, or consists of) contacting retinal cells of a mammal having the retinal condition with AAV vectors comprising an AAV capsid polypeptide and an exogenous nucleic acid sequence, wherein the capsid polypeptide comprises the amino acid sequence of any one of SEQ ID NOs:L2-L27, wherein the AAV vectors infect the retinal cells and drive expression of the exogenous nucleic acid sequence within the retinal cells, thereby treating the retinal condition. The mammal can be a human (or a non-human primate). The retinal condition can be selected from the group consisting of cone dystrophy, cone/rod dystrophy, retinitis pigmentosa, macular degeneration, achromatopsia, blue cone monochromcy, and color blindness. The capsid polypeptide can comprise the amino acid sequence of SEQ ID NO:1 (or an alternative sequence that is the amino acid sequence set forth in SEQ ID NO:2206 or that is an amino acid sequence at least 95%, at least 96%, at least 97%, at least 98%, or at least 99% identical to the amino acid sequence set forth in SEQ ID NO:1) except that the amino acid sequence of any one of SEQ ID NOs:L2-L27 is located between amino acid positions 587 and 588 of SEQ ID NO:1 (or the appropriate amino acid positions of the alternative sequence). The capsid polypeptide can comprise the amino acid sequence of SEQ ID NO:1 (or an alternative sequence that is the amino acid sequence set forth in SEQ ID NO:2206 or that is an amino acid sequence at least 95%, at least 96%, at least 97%, at least 98%, or at least 99% identical to the amino acid sequence set forth in SEQ ID NO:1) except that the amino acid sequence of any one of SEQ ID NOs:L2-L19 is located between amino acid positions 587 and 588 of SEQ ID NO:1 (or the appropriate amino acid positions of the alternative sequence). The capsid polypeptide can comprise the amino acid sequence of SEQ ID NO:1 (or an alternative sequence that is the amino acid sequence set forth in SEQ ID NO:2206 or that is an amino acid sequence at least 95%, at least 96%, at least 97%, at least 98%, or at least 99% identical to the amino acid sequence set forth in SEQ ID NO:1) except that the amino acids from position 585 to 590 of SEQ ID NO: 1 are replaced with the amino acid sequence of any one of SEQ ID NOs:L2-L27. The capsid polypeptide can comprise the amino acid sequence of SEQ ID NO:1 (or an alternative sequence that is the amino acid sequence set forth in SEQ ID NO:2206 or that is an amino acid sequence at least 95%, at least 96%, at least 97%, at least 98%, or at least 99% identical to the amino acid sequence set forth in SEQ ID NO:1) except that the amino acids from position 585 to 590 of SEQ ID NO:1 are replaced with the amino acid sequence of any one of SEQ ID NOs:L20-L27. The vectors can be AAV2 vectors. The vector can have a packaging efficiency greater than that of a comparable AAV vector comprising a capsid polypeptide consisting of the amino acid sequence set forth in SEQ ID NO:1. The exogenous nucleic acid sequence can encode an RNA.

[0154] The RNA can be an siRNA or microRNA. The exogenous nucleic acid can encode a polypeptide. The polypeptide can be an ABCA4 polypeptide, a CRB1 polypeptide, an NPHP5 polypeptide, or an NR2E3 polypeptide. The vector can have a packaging efficiency at least 10 percent greater than that of a comparable AAV vector comprising a capsid polypeptide consisting of the amino acid sequence set forth in SEQ ID NO:1. The method can comprise intravitreally administering a composition comprising the vectors to the mammal, thereby contacting the retinal cells with the vectors. The composition can comprise from about 1×10⁷ to about 1×10¹⁴ of the vector.

[0155] Unless otherwise defined, all technical and scientific terms used herein have the same meaning as commonly understood by one of ordinary skill in the art to which this invention pertains. Although methods and materials similar or equivalent to those described herein can be used to practice the invention, suitable methods and methods are described below. All publications, patent applications, patents, and other references mentioned herein are incorporated by reference in their entirety. In case of conflict, the present specification, including definitions will control. In addition, the materials, methods, and examples are illustrative only and not intended to be limiting.

[0156] The details of one or more embodiments of the invention are set forth in the accompanying description below. Other features, objects, and advantages of the invention will be apparent from the description and from the claims.

### DESCRIPTION OF DRAWINGS

[0157] FIG. 1 is a listing of SEQ ID NOs:2207-2208.

[0158] FIG. 2 a diagram of AAV vectors that include a wild type AAV2 Rep polypeptide and an indicated AAV2 capsid polypeptide engineered to include an insert sequence (e.g., any one of SEQ ID NOs:2-1103 or a sequence of Formula A) located between positions 587 and 588 (using SEQ ID NO:1 numbering), according to some embodiments.

[0159] FIG. 3 is a diagram of AAV vectors that include a mutant AAV2 Rep polypeptide (AAV2-M1T-REP) and an indicated AAV2 capsid polypeptide engineered to include an insert sequence (e.g., any one of SEQ ID NOs:2-1103 or a sequence of Formula A) located between positions 587 and 588 (using SEQ ID NO:1 numbering), according to some embodiments.

[0160] FIG. 4 is a diagram of AAV vectors that include a wild type AAV2 Rep polypeptide and an indicated AAV2 capsid polypeptide engineered to include an insert sequence (e.g., any one of SEQ ID NOs:2-1103 or a sequence of Formula A) as a replacement of amino acid residues at positions 585 to 590 (using SEQ ID NO:1 numbering), according to some embodiments.

[0161] FIG. 5 is a diagram of AAV vectors that include a mutant AAV2 Rep polypeptide (AAV2-M1T-REP) and an indicated AAV2 capsid polypeptide engineered to include an insert sequence (e.g., any one of SEQ ID NOs:2-1103 or a sequence of Formula A) as a replacement of amino acid residues at positions 585 to 590 (using SEQ ID NO:1 numbering), according to some embodiments.

### DETAILED DESCRIPTION

[0162] This document provides AAV vectors (e.g., AAV2 vectors). For example, this document provides AAV vectors (e.g., AAV2 vectors) containing a capsid polypeptide that includes an amino acid sequence set forth in any one or more of Tables 1A-1L (or a variant thereof) or according to Formula A based on such a set forth sequence. Any appropriate AAV vector can be designed to include a capsid polypeptide described herein (e.g., a capsid polypeptide that includes an amino acid sequence set forth in any one or more of Tables 1A-1L (or a variant thereof) or according to Formula A based on such a set forth sequence). For example, AAV2, AAV8, and AAV9 can be designed to include a capsid polypeptide that includes an amino acid sequence set forth in any one or more of Tables 1A-1L (or a variant thereof) or according to Formula A based on such a set forth sequence. In some cases, an AAV2 having an ACG start codon for the AAV Rep polypeptides (e.g., AAV2 Rep78 and Rep68 polypeptides; see, e.g., SEQ ID NOs:2207-2208) instead of an ATG start codon (e.g., an AAV2-M1T-REP) can be designed to include a capsid polypeptide that includes an amino acid sequence set forth in Table 1 (or a variant thereof) or Formula A.

[0163] Any appropriate AAV capsid polypeptide can be designed to include an amino acid sequence set forth in any one or more of Tables 1A-1L (or a variant thereof) or according to Formula A based on such a set forth sequence. For example, AAV2, AAV6, AAV8, and AAV9 capsid polypeptides can be designed to include an amino acid sequence set forth in any one or more of Tables 1A-1L (or a variant thereof) or according to Formula A based on such a set forth sequence. In some cases, an AAV2 capsid polypeptide can be designed to include an amino acid sequence set forth in any one or more of Tables 1A-1L (or a variant thereof) or according to Formula A based on such a set forth sequence. In some cases, an AAV2 capsid polypeptide having the following amino acid sequence can be designed to include an amino acid sequence set forth in any one or more of Tables 1A-1L (or a variant thereof) or according to Formula A based on such a set forth sequence: MAADGYLPDWLEDTLSEGIRQWWKLKPG PPPPKPAERHKDDSRGLVLPGYKYLGPFNGLDKGEPVNEADAAALEHDKAYDRQLDSG DNPYLKYNHADAEFQERLKEDTSFGGNLGRAVFQAKKRVLEPLGLVEEPVKTAPGKKR PVEHSPVEPDSSSGTGKAGQQPARKRLNFGQTGDADSVPDPQPLGQPPAAPSGLGTNTM ATGSGAPMADNNEGADGVGNSSGNWHCDSTWMGDRVITTSTRTWALPTYNNHLYKQI SSQSGASNDNHYFGYSTPWGYFDFNRFHCHFSPRDWQRLINNNWGFRPKRLNFKLFNIQ VKEVTQNDGTTTIANNLTSTVQVFTDSEYQLPYVLGSAHQGCLPPFPADVFMVPQYGYL TLNNGSQAVGRSSFYCLEYFPSQMLRTGNNFTFSYTFEDVPFHSSYAHSQSLDRLMNPLI DQYLYYLSRTNTPSGT TTQSRLQFSQAGASDIRDQSRNWLPGPCYRQQRVSKTSADNNN SEYSWTGATKYHLNGRDSLVNPGPAMASHKDDEEKFFPQSGVLIFGKQGSEKTNVDIEK VMITDEEEIRTTNPVATEQYGSVSTNLQRGNRQAATADVNTQGVLPGMVWQDRDVYL QGPIWAKIPHTDGHFHPSPLMGGFGLKHPPPQILIKNTPVPANPSTTFSAAKFASFITQYST GQVSVEIEWELQKENSKRWNPEIQYTSNYNKSVNVDFTVDTNGVYSEPRPIGTRYLTRN L (SEQ ID NO:1). The two bold amino acid residues are at positions 587 and 588, and the underlined amino acids are at positions 585 to 590.

[0164] In some cases, an AAV capsid polypeptide (e.g., an AAV2 capsid polypeptide) having the following amino acid sequence can be designed to include an amino acid sequence set forth in Table 1 (or a variant thereof) or Formula A: MAADGYLPDWLEDTLSEGIRQWWKLKPG PPPPKPAERHKDDSRGLVLPGYKYLGPFNGLDKGEPVNX₁ADAAALEHDKAYDRQLDS GDNPYLKYNHADAEFQERLKEDTSFGGNLGRAVFQAKKRVLEPLGLVEEPVKTAPGKK RPVEHSPVEPDSSSGTGKAGQQPARKRLNFGQTGDADSVPDPQPLGQPPAAPSGLGTNT MATGSGAPMADNNEGADGVGNSSGNWHCDSTWMGDRVITTSTRTWALPTYNNHLYK QISSQ SGASNDNHYFGYSTPWGYFDFNRFHCHFSPRDWQRLINNNWGFRPKRLNFKLFN IQVKEVTQNDGTTTIANNLTSTVQVFTDSEYQLPYVLGSAHQGCLPPFPADVFMVPQYG YLTLNNGSQAVGRSSFYCLEYFPSQMLRTGNNFTFSYTFEDVPFHSSYAHSQSLDRLMN PLIDQYLYYLSRTNTPSGTTTQSRLQFSQAGASDIRDQSRNWLPGPCYRQQRVSKTSAD NNNSEYSWTGATKYHLNGRDSLVNPGP AMASHKDDEEKFFPQSGVLIFGKQGSEKTNV DIEKVMITDEEEIRTTNPVATEQYGSVSTNLQRGNRQAATADVNTQGVLPGMVWQDRD VYLQGPIWAKIPHTDGHFHPSPLMGGFGLKHPPPQILIKNTPVPANPST TFSAAKFASFIT QYSTGQVSVEIEWELQKENSKRWNPEIQYTSNYNKSX₂NVDFTVDTNGVYSEPRPIGTR YLTRNL, wherein X₁ is E or A, and wherein X₂ is V or I (SEQ ID NO:2206).

[0165] In some cases, an AAV capsid polypeptide (e.g., an AAV2 capsid polypeptide) that is at least 95%, at least 96%, at least 97%, at least 98%, or at least 99% identical to the amino acid sequence set forth in SEQ ID NO:1 can be designed to include an amino acid sequence set forth in Table 1 (or a variant thereof) or Formula A.

[0166] In some cases, certain AAV2 sequences contemplated herein can include modifications or mutations of SEQ ID NO:1 such as a V708I substitution.

[0167] When designing an AAV capsid polypeptide (e.g., an AAV2 capsid polypeptide) to include an amino acid sequence set forth in any one or more of Tables 1A-1L (or a variant thereof) or according to Formula A based on such a set forth sequence, that included amino acid sequence can be located at any appropriate location along the AAV capsid polypeptide (e.g., the AAV2 capsid polypeptide). For example, an amino acid sequence set forth in any one or more of Tables 1A-1L (or a variant thereof) or according to Formula A based on such a set forth sequence such as any one of SEQ ID NOs:A2-A19, SEQ ID NOs:B2-B317, SEQ ID NOs:C2-C45, SEQ ID NOs:D2-D78, SEQ ID NOs:E2-E83, SEQ ID NOs:F2-F10, SEQ ID NOs:G2-G77, SEQ ID NOs:H2-H258, SEQ ID NOs:I2-174, SEQ ID NOs:J2-J64, SEQ ID NOs:K2-K63, and SEQ ID NOs:L2-L27 can be located between the naturally-occurring amino acid residues at positions 587 and 588 of an AAV capsid polypeptide (e.g., an AAV2 capsid polypeptide), can be located between the naturally-occurring amino acid residues at positions 452 and 453 of an AAV capsid polypeptide (e.g., an AAV2 capsid polypeptide), or can be located between the naturally-occurring amino acid residues at positions 453 and 454 of an AAV capsid polypeptide (e.g., an AAV2 capsid polypeptide).

TABLE 1A
Amino acid sequences that can be inserted
into an AAV capsid polypeptide.

| | | | Nucleic Acid | | | |
|---|---|---|---|---|---|---|
| | | | Sequence en- | | | |
| Amino | SEQ | SEQ | coding the | SEQ | SEQ | |
| Acid | ID | ID | Amino Acid | ID | ID | Activity |
| Sequence | NO: | NO:** | Sequence | NO: | NO:** | Level* |
| TGYSSTNG | A2 | 2 | ACCGGCTACAGCAG | A20 | 1104 | +++ |
| | | | CACCAACGGC | | | |
| LADLSDHHA | A3 | 3 | CTAGCAGACCTGAG | A21 | 1105 | +++ |
| | | | CGACCACCACGCT | | | |
| SGTEATRG | A4 | 4 | AGCGGCACCGAGGC | A22 | 1106 | +++ |
| | | | CACCCGGGGC | | | |
| TGQDKPTG | A5 | 5 | ACCGGCCAGGACAA | A23 | 1107 | +++ |
| | | | GCCCACCGGC | | | |
| SSMDPRHG | A6 | 6 | AGCAGCATGGACCC | A24 | 1108 | +++ |
| | | | CCGGCACGGC | | | |
| LANLKENEA | A7 | 7 | CTAGCAAACCTGAA | A25 | 1109 | +++ |
| | | | GGAGAACGAGGCT | | | |
| LAIKMIAYA | A8 | 8 | CTAGCAATCAAGAT | A26 | 1110 | ++ |
| | | | GATCGCCTACGCT | | | |
| TGEGPTKG | A9 | 9 | ACCGGCGAGGGCCC | A27 | 1111 | ++ |
| | | | CACCAAGGGC | | | |
| SGSVGYVG | A10 | 10 | AGCGGCAGCGTGGG | A28 | 1112 | ++ |
| | | | CTACGTGGGC | | | |
| LAQVQVEGA | All | 11 | CTAGCACAGGTGCA | A29 | 1113 | ++ |
| | | | GGTGGAGGGCGCT | | | |
| SGFDATKG | A12 | 12 | AGCGGCTTCGACGC | A30 | 1114 | ++ |
| | | | CACCAAGGGC | | | |
| TTDLNHKG | A13 | 13 | ACCACCGACCTGAA | A31 | 1115 | + |
| | | | CCACAAGGGC | | | |
| SSRAYQET | A14 | 14 | AGCAGCCGGGCCTA | A32 | 1116 | + |
| | | | CCAGGAGACC | | | |
| LAKVASMNA | A15 | 15 | CTAGCAAAGGTGGC | A32 | 1117 | + |
| | | | CAGCATGAACGCT | | | |
| TSQEKQNS | A16 | 16 | ACCAGCCAGGAGAA | A34 | 1118 | + |
| | | | GCAGAACAGC | | | |
| LAAHQMASA | A17 | 17 | CTAGCAGCCCACCA | A35 | 1119 | + |
| | | | GATGGCCAGCGCT | | | |
| LAKGQAQNA | A18 | 18 | CTAGCAAAGGGCCA | A36 | 1120 | + |
| | | | GGCCCAGAACGCT | | | |
| RTGRNT | A19 | 19 | CGGACCGGCCGGAA | A37 | 1121 | ++ |
| | | | CACC | | | |

*AAV2 vectors designed to include SEQ ID NO: 1 with the indicated sequence inclusion. The 8-mers and 9-mers were inserted between amino acid residues 587 and 588 of SEQ ID NO: 1, and the 6-mers were used as replacements for amino acid residues 585 to 590 of SEQ ID NO: 1.
+++ means that the modified AAV2 vectors had a performance that placed them within the top 1/3 of the rescued AAV vectors;
++ means the AAV2 vectors had a performance that placed them within the middle 1/3 of the rescued AAV vectors; and
+ means the AAV2 vectors had a performance that placed them within the bottom 1/3 of the rescued AAV vectors.
**SEQ ID NOs used for Sequence Listing.

TABLE 1B
Amino acid sequences that can be inserted into an AAV capsid
polypeptide.

| Amino | SEQ | | SEQ | Nucleic Acid Sequence | SEQ | | SEQ | |
|---|---|---|---|---|---|---|---|---|
| Acid | ID | | ID | encoding the Amino | ID | | ID | Activity |
| Sequence | NO: | | NO:** | Acid Sequence | NO: | | NO:** | Level* |
| LATTTMGTA | B | 2 | 20 | CTAGCAACCACCACCATGGGCACCGCT | B | 318 | 1122 | +++ |
| LARRKSNEA | B | 3 | 21 | CTAGCACGGCGGAAGAGCAACGAGGCT | B | 319 | 1123 | +++ |
| LAHGGLREA | B | 4 | 22 | CTAGCACACGGCGGCCTGCGGGAGGCT | B | 320 | 1124 | +++ |
| LAMFVWVPA | B | 5 | 23 | CTAGCAATGTTCGTGTGGGTGCCCGCT | B | 321 | 1125 | +++ |
| LATDRTKTA | B | 6 | 24 | CTAGCAACCGACCGGACCAAGACCGCT | B | 322 | 1126 | +++ |
| LAFNSCSYA | B | 7 | 25 | CTAGCATTCAACAGCTGCAGCTACGCT | B | 323 | 1127 | +++ |
| LAYAEQSKA | B | 8 | 26 | CTAGCATACGCCGAGCAGAGCAAGGCT | B | 324 | 1128 | +++ |
| LAWRIMKHA | B | 9 | 27 | CTAGCATGGCGGATCATGAAGCACGCT | B | 325 | 1129 | +++ |
| LAVDNIWAA | B | 10 | 28 | CTAGCAGTGGACAACATCTGGGCCGCT | B | 326 | 1130 | +++ |
| LAGQAMMQA | B | 11 | 29 | CTAGCAGGCCAGGCCATGATGCAGGCT | B | 327 | 1131 | +++ |
| LAELALIKA | B | 12 | 30 | CTAGCAGAGCTGGCCCTGATCAAGGCT | B | 328 | 1132 | +++ |
| LAMTKITDA | B | 13 | 31 | CTAGCAATGACCAAGATCACCGACGCT | B | 329 | 1133 | +++ |
| LALENIGQA | B | 14 | 32 | CTAGCACTGGAGAACATCGGCCAGGCT | B | 330 | 1134 | +++ |
| LAFTHGTNA | B | 15 | 33 | CTAGCATTCACCCACGGCACCAACGCT | B | 331 | 1135 | +++ |
| LAKINAQPA | B | 16 | 34 | CTAGCAAAGATCAACGCCCAGCCCGCT | B | 332 | 1136 | +++ |
| LADLSDHHA | B | 17 | 35 | CTAGCAGACCTGAGCGACCACCACGCT | B | 333 | 1137 | +++ |
| LADPLYAVA | B | 18 | 36 | CTAGCAGACCCCCTGTACGCCGTGGCT | B | 334 | 1138 | +++ |
| LAYVALFYA | B | 19 | 37 | CTAGCATACGTGGCCCTGTTCTACGCT | B | 335 | 1139 | +++ |
| LAGGEYETA | B | 20 | 38 | CTAGCAGGCGGCGAGTACGAGACCGCT | B | 336 | 1140 | +++ |
| LAALVDANA | B | 21 | 39 | CTAGCAGCCCTGGTGGACGCCAACGCT | B | 337 | 1141 | +++ |
| LADPTETPA | B | 22 | 40 | CTAGCAGACCCCACCGAGACCCCCGCT | B | 338 | 1142 | +++ |
| LAHRAPDSA | B | 23 | 41 | CTAGCACACCGGGCCCCCGACAGCGCT | B | 339 | 1143 | +++ |
| LAEGQEDSA | B | 24 | 42 | CTAGCAGAGGGCCAGGAGGACAGCGCT | B | 340 | 1144 | +++ |
| LAEEEKYGA | B | 25 | 43 | CTAGCAGAGGAGGAGAAGTACGGCGCT | B | 341 | 1145 | +++ |
| LALNDNVGA | B | 26 | 44 | CTAGCACTGAACGACAACGTGGGCGCT | B | 342 | 1146 | +++ |
| LAPDAKDWA | B | 27 | 45 | CTAGCACCCGACGCCAAGGACTGGGCT | B | 343 | 1147 | +++ |
| LAPHIAKDA | B | 28 | 46 | CTAGCACCCCACATCGCCAAGGACGCT | B | 344 | 1148 | +++ |
| LADPGWKYA | B | 29 | 47 | CTAGCAGACCCCGGCTGGAAGTACGCT | B | 345 | 1149 | +++ |
| LASRTAVAA | B | 30 | 48 | CTAGCAAGCCGGACCGCCGTGGCCGCT | B | 346 | 1150 | +++ |
| LAFCIKHCA | B | 31 | 49 | CTAGCATTCTGCATCAAGCACTGCGCT | B | 347 | 1151 | +++ |
| LAEPDHTLA | B | 32 | 50 | CTAGCAGAGCCCGACCACACCTTGGCT | B | 348 | 1152 | +++ |
| LAPMRGVYA | B | 33 | 51 | CTAGCACCCATGCGGGGCGTGTACGCT | B | 349 | 1153 | +++ |
| LAAVTKDSA | B | 34 | 52 | CTAGCAGCCGTGACCAAGGACAGCGCT | B | 350 | 1154 | +++ |
| LAITQSDIA | B | 35 | 53 | CTAGCAATCACCCAGAGCGACATCGCT | B | 351 | 1155 | +++ |
| LAPNQGTPA | B | 36 | 54 | CTAGCACCCAACCAGGGCACCCCCGCT | B | 352 | 1156 | +++ |
| LAVMGNMLA | B | 37 | 55 | CTAGCAGTGATGGGCAACATGCTGGCT | B | 353 | 1157 | +++ |
| LASNMERIA | B | 38 | 56 | CTAGCAAGCAACATGGAGCGGATCGCT | B | 354 | 1158 | +++ |
| LAHWQEEWA | B | 39 | 57 | CTAGCACACTGGCAGGAGGAGTGGGCT | B | 355 | 1159 | +++ |
| LADDMIFVA | B | 40 | 58 | CTAGCAGACGACATGATCTTCGTGGCT | B | 356 | 1160 | +++ |
| LAHEPMFNA | B | 41 | 59 | CTAGCACACGAGCCCATGTTCAACGCT | B | 357 | 1161 | +++ |
| LATVYKSPA | B | 42 | 60 | CTAGCAACCGTGTACAAGAGCCCCGCT | B | 358 | 1162 | +++ |
| LADNLNTPA | B | 43 | 61 | CTAGCAGACAACCTGAACACCCCCGCT | B | 359 | 1163 | +++ |
| LAYVIENDA | B | 44 | 62 | CTAGCATACGTGATCGAGAACGACGCT | B | 360 | 1164 | +++ |
| LALEVGDHA | B | 45 | 63 | CTAGCACTGGAGGTGGGCGACCACGCT | B | 361 | 1165 | +++ |
| LAHEGRQAA | B | 46 | 64 | CTAGCACACGAGGGCCGGCAGGCCGCT | B | 362 | 1166 | +++ |
| LASTTMNIA | B | 47 | 65 | CTAGCAAGCACCACCATGAACATCGCT | B | 363 | 1167 | +++ |
| LAEFHIPTA | B | 48 | 66 | CTAGCAGAGTTCCACATCCCCACCGCT | B | 364 | 1168 | +++ |
| LAEFRVGQA | B | 49 | 67 | CTAGCAGAGTTCCGGGTGGGCCAGGCT | B | 365 | 1169 | +++ |
| LADAHSVTA | B | 50 | 68 | CTAGCAGACGCCCACAGCGTGACCGCT | B | 366 | 1170 | +++ |
| LAKPPPKDA | B | 51 | 69 | CTAGCAAAGCCCCCCCCCAAGGACGCT | B | 367 | 1171 | +++ |
| LAIGSDTSA | B | 52 | 70 | CTAGCAATCGGCAGCGACACCAGCGCT | B | 368 | 1172 | +++ |
| LAFQQQRCA | B | 53 | 71 | CTAGCATTCCAGCAGCAGCGGTGCGCT | B | 369 | 1173 | +++ |
| LAAVHLMGA | B | 54 | 72 | CTAGCAGCCGTGCACCTGATGGGCGCT | B | 370 | 1174 | +++ |
| LACTYTYAA | B | 55 | 73 | CTAGCATGCACCTACACCTACGCCGCT | B | 371 | 1175 | +++ |
| LAVRNEINA | B | 56 | 74 | CTAGCAGTGCGGAACGAGATCAACGCT | B | 372 | 1176 | +++ |
| LADSSKWIA | B | 57 | 75 | CTAGCAGACAGCAGCAAGTGGATCGCT | B | 373 | 1177 | +++ |
| LADYRNDKA | B | 58 | 76 | CTAGCAGACTACCGGAACGACAAGGCT | B | 374 | 1178 | +++ |
| LANANTRPA | B | 59 | 77 | CTAGCAAACGCCAACACCCGGCCCGCT | B | 375 | 1179 | +++ |
| LAPQNLDEA | B | 60 | 78 | CTAGCACCCCAGAACCTGGACGAGGCT | B | 376 | 1180 | +++ |
| LAHPGTTFA | B | 61 | 79 | CTAGCACACCCCGGCACCACCTTCGCT | B | 377 | 1181 | +++ |
| LAYDAGGHA | B | 62 | 80 | CTAGCATACGACGCCGGCGGCCACGCT | B | 378 | 1182 | +++ |
| LAKALGMEA | B | 63 | 81 | CTAGCAAAGGCCCTGGGCATGGAGGCT | B | 379 | 1183 | +++ |
| LAGENHISA | B | 64 | 82 | CTAGCAGGCGAGAACCACATCAGCGCT | B | 380 | 1184 | +++ |
| LARDQLKLA | B | 65 | 83 | CTAGCACGGGACCAGCTGAAGCTGGCT | B | 381 | 1185 | +++ |
| LACPVAEWA | B | 66 | 84 | CTAGCATGCCCCGTGGCCGAGTGGGCT | B | 382 | 1186 | +++ |
| LAQVKQGPA | B | 67 | 85 | CTAGCACAGGTGAAGCAGGGCCCCGCT | B | 383 | 1187 | +++ |
| LALPEGRFA | B | 68 | 86 | CTAGCACTGCCCGAGGGCCGGTTCGCT | B | 384 | 1188 | +++ |
| LAMNEPVTA | B | 69 | 87 | CTAGCAATGAACGAGCCCGTGACCGCT | B | 385 | 1189 | +++ |
| LAAVTEYVA | B | 70 | 88 | CTAGCAGCCGTGACCGAGTACGTGGCT | B | 386 | 1190 | +++ |
| LADGGTRPA | B | 71 | 89 | CTAGCAGACGGCGGCACCCGGCCCGCT | B | 387 | 1191 | +++ |
| LAPPGNPLA | B | 72 | 90 | CTAGCACCCCCCGGCAACCCCCTGGCT | B | 388 | 1192 | +++ |
| LANIVQQDA | B | 73 | 91 | CTAGCAAACATCGTGCAGCAGGACGCT | B | 389 | 1193 | +++ |
| LAVSRHGEA | B | 74 | 92 | CTAGCAGTGAGCCGGCACGGCGAGGCT | B | 390 | 1194 | +++ |
| LANEAQGKA | B | 75 | 93 | CTAGCAAACGAGGCCCAGGGCAAGGCT | B | 391 | 1195 | +++ |
| LAPMGQNMA | B | 76 | 94 | CTAGCACCCATGGGCCAGAACATGGCT | B | 392 | 1196 | +++ |
| LAAYHDSAA | B | 77 | 95 | CTAGCAGCCTACCACGACAGCGCCGCT | B | 393 | 1197 | +++ |
| LAGIQQHVA | B | 78 | 96 | CTAGCAGGCATCCAGCAGCACGTGGCT | B | 394 | 1198 | +++ |
| LASVSTIQA | B | 79 | 97 | CTAGCAAGCGTGAGCACCATCCAGGCT | B | 395 | 1199 | +++ |
| LAAVGMKMA | B | 80 | 98 | CTAGCAGCCGTGGGCATGAAGATGGCT | B | 396 | 1200 | +++ |
| LAQVTEMRA | B | 81 | 99 | CTAGCACAGGTGACCGAGATGCGGGCT | B | 397 | 1201 | +++ |
| LADTHTTYA | B | 82 | 100 | CTAGCAGACACCCACACCACCTACGCT | B | 398 | 1202 | +++ |
| LAIGERTTA | B | 83 | 101 | CTAGCAATCGGCGAGCGGACCACCGCT | B | 399 | 1203 | +++ |
| LANKNTAIA | B | 84 | 102 | CTAGCAAACAAGAACACCGCCATCGCT | B | 400 | 1204 | +++ |
| LANLKENEA | B | 85 | 103 | CTAGCAAACCTGAAGGAGAACGAGGCT | B | 401 | 1205 | +++ |
| LAEYHNNDA | B | 86 | 104 | CTAGCAGAGTACCACAACAACGACGCT | B | 402 | 1206 | +++ |
| LAFNGSTSA | B | 87 | 105 | CTAGCATTCAACGGCAGCACCAGCGCT | B | 403 | 1207 | +++ |
| LAGFMEYYA | B | 88 | 106 | CTAGCAGGCTTCATGGAGTACTACGCT | B | 404 | 1208 | +++ |
| LAMGHNYVA | B | 89 | 107 | CTAGCAATGGGCCACAACTACGTGGCT | B | 405 | 1209 | +++ |
| LAGEFTGKA | B | 90 | 108 | CTAGCAGGCGAGTTCACCGGCAAGGCT | B | 406 | 1210 | ++ |
| LAKGFKTEA | B | 91 | 109 | CTAGCAAAGGGCTTCAAGACCGAGGCT | B | 407 | 1211 | ++ |
| LAWNKCPYA | B | 92 | 110 | CTAGCATGGAACAAGTGCCCCTACGCT | B | 408 | 1212 | ++ |
| LAQEQNAAA | B | 93 | 111 | CTAGCACAGGAGCAGAACGCCGCCGCT | B | 409 | 1213 | ++ |
| LAKDGMIGA | B | 94 | 112 | CTAGCAAAGGACGGCATGATCGGCGCT | B | 410 | 1214 | ++ |
| LAPTTIGGA | B | 95 | 113 | CTAGCACCCACCACCATCGGCGGCGCT | B | 411 | 1215 | ++ |
| LAVKGLVNA | B | 96 | 114 | CTAGCAGTGAAGGGCCTGGTGAACGCT | B | 412 | 1216 | ++ |
| LALNSGKMA | B | 97 | 115 | CTAGCACTGAACAGCGGCAAGATGGCT | B | 413 | 1217 | ++ |
| LALYQCDTA | B | 98 | 116 | CTAGCACTGTACCAGTGCGACACCGCT | B | 414 | 1218 | ++ |
| LAPQKQPVA | B | 99 | 117 | CTAGCACCCCAGAAGCAGCCCGTGGCT | B | 415 | 1219 | ++ |
| LAEHKNMHA | B | 100 | 118 | CTAGCAGAGCACAAGAACATGCACGCT | B | 416 | 1220 | ++ |
| LAEFDGDGA | B | 101 | 119 | CTAGCAGAGTTCGACGGCGACGGCGCT | B | 417 | 1221 | ++ |
| LASRLNSPA | B | 102 | 120 | CTAGCAAGCCGGCTGAACAGCCCCGCT | B | 418 | 1222 | ++ |
| LAPCYEPPA | B | 103 | 121 | CTAGCACCCTGCTACGAGCCCCCCGCT | B | 419 | 1223 | ++ |
| LALKLRTEA | B | 104 | 122 | CTAGCACTGAAGCTGCGGACCGAGGCT | B | 420 | 1224 | ++ |
| LAAGQAQSA | B | 105 | 123 | CTAGCAGCCGGCCAGGCCCAGAGCGCT | B | 421 | 1225 | ++ |
| LATPNVNAA | B | 106 | 124 | CTAGCAACCCCCAACGTGAACGCCGCT | B | 422 | 1226 | ++ |
| LARAITNEA | B | 107 | 125 | CTAGCACGGGCCATCACCAACGAGGCT | B | 423 | 1227 | ++ |
| LAEVTYTGA | B | 108 | 126 | CTAGCAGAGGTGACCTACACCGGCGCT | B | 424 | 1228 | ++ |
| LAPSGDRHA | B | 109 | 127 | CTAGCACCCAGCGGCGACCGGCACGCT | B | 425 | 1229 | ++ |
| LAYITEKSA | B | 110 | 128 | CTAGCATACATCACCGAGAAGAGCGCT | B | 426 | 1230 | ++ |
| LAKDHHVIA | B | 111 | 129 | CTAGCAAAGGACCACCACGTGATCGCT | B | 427 | 1231 | ++ |
| LASADHQPA | B | 112 | 130 | CTAGCAAGCGCCGACCACCAGCCCGCT | B | 428 | 1232 | ++ |
| LATMHNFEA | B | 113 | 131 | CTAGCAACCATGCACAACTTCGAGGCT | B | 429 | 1233 | ++ |
| LARGVAPIA | B | 114 | 132 | CTAGCACGGGGCGTGGCCCCCATCGCT | B | 430 | 1234 | ++ |
| LAWKCKGTA | B | 115 | 133 | CTAGCATGGAAGTGCAAGGGCACCGCT | B | 431 | 1235 | ++ |
| LAKGILMEA | B | 116 | 134 | CTAGCAAAGGGCATCCTGATGGAGGCT | B | 432 | 1236 | ++ |
| LANIVSHDA | B | 117 | 135 | CTAGCAAACATCGTGAGCCACGACGCT | B | 433 | 1237 | ++ |
| LAEFVHKGA | B | 118 | 136 | CTAGCAGAGTTCGTGCACAAGGGCGCT | B | 434 | 1238 | ++ |
| LASAVMYWA | B | 119 | 137 | CTAGCAAGCGCCGTGATGTACTGGGCT | B | 435 | 1239 | ++ |
| LAQKKLLEA | B | 120 | 138 | CTAGCACAGAAGAAGCTGCTGGAGGCT | B | 436 | 1240 | ++ |
| LAGERETVA | B | 121 | 139 | CTAGCAGGCGAGCGGGAGACCGTGGCT | B | 437 | 1241 | ++ |
| LAFLRGPEA | B | 122 | 140 | CTAGCATTCCTGCGGGGCCCCGAGGCT | B | 438 | 1242 | ++ |
| LAAVGVGYA | B | 123 | 141 | CTAGCAGCCGTGGGCGTGGGCTACGCT | B | 439 | 1243 | ++ |
| LADLGYPNA | B | 124 | 142 | CTAGCAGACCTGGGCTACCCCAACGCT | B | 440 | 1244 | ++ |
| LAAKPKDGA | B | 125 | 143 | CTAGCAGCCAAGCCCAAGGACGGCGCT | B | 441 | 1245 | ++ |
| LADKNRLQA | B | 126 | 144 | CTAGCAGACAAGAACCGGCTGCAGGCT | B | 442 | 1246 | ++ |
| LADMTRFHA | B | 127 | 145 | CTAGCAGACATGACCCGGTTCCACGCT | B | 443 | 1247 | ++ |
| LARSSTLNA | B | 128 | 146 | CTAGCACGGAGCAGCACCCTGAACGCT | B | 444 | 1248 | ++ |
| LACYPPTCA | B | 129 | 147 | CTAGCATGCTACCCCCCCACCTGCGCT | B | 445 | 1249 | ++ |
| LAKVSKGDA | B | 130 | 148 | CTAGCAAAGGTGAGCAAGGGCGACGCT | B | 446 | 1250 | ++ |
| LAGGKQALA | B | 131 | 149 | CTAGCAGGCGGCAAGCAGGCCCTGGCT | B | 447 | 1251 | ++ |
| LADIVGESA | B | 132 | 150 | CTAGCAGACATCGTGGGCGAGAGCGCT | B | 448 | 1252 | ++ |
| LADFPSEKA | B | 133 | 151 | CTAGCAGACTTCCCCAGCGAGAAGGCT | B | 449 | 1253 | ++ |
| LAHIQEPKA | B | 134 | 152 | CTAGCACACATCCAGGAGCCCAAGGCT | B | 450 | 1254 | ++ |
| LAAANHDNA | B | 135 | 153 | CTAGCAGCCGCCAACCACGACAACGCT | B | 451 | 1255 | ++ |
| LAALNSQTA | B | 136 | 154 | CTAGCAGCCCTGAACAGCCAGACCGCT | B | 452 | 1256 | ++ |
| LAEPFPVAA | B | 137 | 155 | CTAGCAGAGCCCTTCCCCGTGGCCGCT | B | 453 | 1257 | ++ |
| LAELDFKWA | B | 138 | 156 | CTAGCAGAGCTGGACTTCAAGTGGGCT | B | 454 | 1258 | ++ |
| LAKFMWIHA | B | 139 | 157 | CTAGCAAAGTTCATGTGGATCCACGCT | B | 455 | 1259 | ++ |
| LAQVQVEGA | B | 140 | 158 | CTAGCACAGGTGCAGGTGGAGGGCGCT | B | 456 | 1260 | ++ |
| LADILVGQA | B | 141 | 159 | CTAGCAGACATCCTGGTGGGCCAGGCT | B | 457 | 1261 | ++ |
| LAQWFLWRA | B | 142 | 160 | CTAGCACAGTGGTTCCTGTGGCGGGCT | B | 458 | 1262 | ++ |
| LALHQERQA | B | 143 | 161 | CTAGCACTGCACCAGGAGCGGCAGGCT | B | 459 | 1263 | ++ |
| LACSSTWYA | B | 144 | 162 | CTAGCATGCAGCAGCACCTGGTACGCT | B | 460 | 1264 | ++ |
| LAGSMAKLA | B | 145 | 163 | CTAGCAGGCAGCATGGCCAAGCTGGCT | B | 461 | 1265 | ++ |
| LAPNTPKIA | B | 146 | 164 | CTAGCACCCAACACCCCCAAGATCGCT | B | 462 | 1266 | ++ |
| LALDMWEPA | B | 147 | 165 | CTAGCACTGGACATGTGGGAGCCCGCT | B | 463 | 1267 | ++ |
| LAGHAACFA | B | 148 | 166 | CTAGCAGGCCACGCCGCCTGCTTCGCT | B | 464 | 1268 | ++ |
| LAVRTGSMA | B | 149 | 167 | CTAGCAGTGCGGACCGGCAGCATGGCT | B | 465 | 1269 | ++ |
| LAGVVKTDA | B | 150 | 168 | CTAGCAGGCGTGGTGAAGACCGACGCT | B | 466 | 1270 | ++ |
| LAKFAAKDA | B | 151 | 169 | CTAGCAAAGTTCGCCGCCAAGGACGCT | B | 467 | 1271 | ++ |
| LAVNRVDMA | B | 152 | 170 | CTAGCAGTGAACCGGGTGGACATGGCT | B | 468 | 1272 | ++ |
| LANNAEPSA | B | 153 | 171 | CTAGCAAACAACGCCGAGCCCAGCGCT | B | 469 | 1273 | ++ |
| LAAKMYNGA | B | 154 | 172 | CTAGCAGCCAAGATGTACAACGGCGCT | B | 470 | 1274 | ++ |
| LAEADKWYA | B | 155 | 173 | CTAGCAGAGGCCGACAAGTGGTACGCT | B | 471 | 1275 | ++ |
| LARGTLMTA | B | 156 | 174 | CTAGCACGGGGCACCCTGATGACCGCT | B | 472 | 1276 | ++ |
| LAKDKGLIA | B | 157 | 175 | CTAGCAAAGGACAAGGGCCTGATCGCT | B | 473 | 1277 | ++ |
| LAQGNNTGA | B | 158 | 176 | CTAGCACAGGGCAACAACACCGGCGCT | B | 474 | 1278 | ++ |
| LAWIERSMA | B | 159 | 177 | CTAGCATGGATCGAGCGGAGCATGGCT | B | 475 | 1279 | ++ |
| LAYDNTAEA | B | 160 | 178 | CTAGCATACGACAACACCGCCGAGGCT | B | 476 | 1280 | ++ |
| LAGFHAIEA | B | 161 | 179 | CTAGCAGGCTTCCACGCCATCGAGGCT | B | 477 | 1281 | ++ |
| LAFGFSADA | B | 162 | 180 | CTAGCATTCGGCTTCAGCGCCGACGCT | B | 478 | 1282 | ++ |
| LAEGMTGIA | B | 163 | 181 | CTAGCAGAGGGCATGACCGGCATCGCT | B | 479 | 1283 | ++ |
| LAHDLHGGA | B | 164 | 182 | CTAGCACACGACCTGCACGGCGGCGCT | B | 480 | 1284 | ++ |
| LAQAGDTAA | B | 165 | 183 | CTAGCACAGGCCGGCGACACCGCCGCT | B | 481 | 1285 | ++ |
| LAGEVTKHA | B | 166 | 184 | CTAGCAGGCGAGGTGACCAAGCACGCT | B | 482 | 1286 | ++ |
| LALNAAATA | B | 167 | 185 | CTAGCACTGAACGCCGCCGCCACCGCT | B | 483 | 1287 | ++ |
| LADCMMINA | B | 168 | 186 | CTAGCAGACTGCATGATGATCAACGCT | B | 484 | 1288 | ++ |
| LAYFHSYAA | B | 169 | 187 | CTAGCATACTTCCACAGCTACGCCGCT | B | 485 | 1289 | ++ |
| LAISQPNPA | B | 170 | 188 | CTAGCAATCAGCCAGCCCAACCCCGCT | B | 486 | 1290 | ++ |
| LAVAVDCFA | B | 171 | 189 | CTAGCAGTGGCCGTGGACTGCTTCGCT | B | 487 | 1291 | ++ |
| LADHGNKPA | B | 172 | 190 | CTAGCAGACCACGGCAACAAGCCCGCT | B | 488 | 1292 | ++ |
| LAAEHIGRA | B | 173 | 191 | CTAGCAGCCGAGCACATCGGCCGGGCT | B | 489 | 1293 | ++ |
| LAVTPPWYA | B | 174 | 192 | CTAGCAGTGACCCCCCCCTGGTACGCT | B | 490 | 1294 | ++ |
| LAVPKADAA | B | 175 | 193 | CTAGCAGTGCCCAAGGCCGACGCCGCT | B | 491 | 1295 | ++ |
| LANMMAAGA | B | 176 | 194 | CTAGCAAACATGATGGCCGCCGGCGCT | B | 492 | 1296 | ++ |
| LANVTLQSA | B | 177 | 195 | CTAGCAAACGTGACCCTGCAGAGCGCT | B | 493 | 1297 | ++ |
| LAPIQLAQA | B | 178 | 196 | CTAGCACCCATCCAGCTGGCCCAGGCT | B | 494 | 1298 | ++ |
| LANQGFLTA | B | 179 | 197 | CTAGCAAACCAGGGCTTCCTGACCGCT | B | 495 | 1299 | ++ |
| LAPLQTQEA | B | 180 | 198 | CTAGCACCCCTGCAGACCCAGGAGGCT | B | 496 | 1300 | ++ |
| LAEQVLEKA | B | 181 | 199 | CTAGCAGAGCAGGTGCTGGAGAAGGCT | B | 497 | 1301 | ++ |
| LAVDIMRGA | B | 182 | 200 | CTAGCAGTGGACATCATGCGGGGCGCT | B | 498 | 1302 | ++ |
| LACTFKPNA | B | 183 | 201 | CTAGCATGCACCTTCAAGCCCAACGCT | B | 499 | 1303 | ++ |
| LATWCLVWA | B | 184 | 202 | CTAGCAACCTGGTGCCTGGTGTGGGCT | B | 500 | 1304 | + |
| LAKSAGILA | B | 185 | 203 | CTAGCAAAGAGCGCCGGCATCCTGGCT | B | 501 | 1305 | + |
| LAYGQQTTA | B | 186 | 204 | CTAGCATACGGCCAGCAGACCACCGCT | B | 502 | 1306 | + |
| LAHAGSSSA | B | 187 | 205 | CTAGCACACGCCGGCAGCAGCAGCGCT | B | 503 | 1307 | + |
| LAGKTISGA | B | 188 | 206 | CTAGCAGGCAAGACCATCAGCGGCGCT | B | 504 | 1308 | + |
| LASIGFSAA | B | 189 | 207 | CTAGCAAGCATCGGCTTCAGCGCCGCT | B | 505 | 1309 | + |
| LAFPCIKEA | B | 190 | 208 | CTAGCATTCCCCTGCATCAAGGAGGCT | B | 506 | 1310 | + |
| LAMLGGTSA | B | 191 | 209 | CTAGCAATGCTGGGCGGCACCAGCGCT | B | 507 | 1311 | + |
| LAGGSKLEA | B | 192 | 210 | CTAGCAGGCGGCAGCAAGCTGGAGGCT | B | 508 | 1312 | + |
| LAADPTFKA | B | 193 | 211 | CTAGCAGCCGACCCCACCTTCAAGGCT | B | 509 | 1313 | + |
| LAETTLTRA | B | 194 | 212 | CTAGCAGAGACCACCCTGACCCGGGCT | B | 510 | 1314 | + |
| LAHDWGAPA | B | 195 | 213 | CTAGCACACGACTGGGGCGCCCCCGCT | B | 511 | 1315 | + |
| LAMDREIKA | B | 196 | 214 | CTAGCAATGGACCGGGAGATCAAGGCT | B | 512 | 1316 | + |
| LAVFQETGA | B | 197 | 215 | CTAGCAGTGTTCCAGGAGACCGGCGCT | B | 513 | 1317 | + |
| LAQVEVSKA | B | 198 | 216 | CTAGCACAGGTGGAGGTGAGCAAGGCT | B | 514 | 1318 | + |
| LAPGNDLWA | B | 199 | 217 | CTAGCACCCGGCAACGACCTGTGGGCT | B | 515 | 1319 | + |
| LAIPVEANA | B | 200 | 218 | CTAGCAATCCCCGTGGAGGCCAACGCT | B | 516 | 1320 | + |
| LAKDGGKIA | B | 201 | 219 | CTAGCAAAGGACGGCGGCAAGATCGCT | B | 517 | 1321 | + |
| LAERNHGYA | B | 202 | 220 | CTAGCAGAGCGGAACCACGGCTACGCT | B | 518 | 1322 | + |
| LAMLACKGA | B | 203 | 221 | CTAGCAATGCTGGCCTGCAAGGGCGCT | B | 519 | 1323 | + |
| LAHHKESIA | B | 204 | 222 | CTAGCACACCACAAGGAGAGCATCGCT | B | 520 | 1324 | + |
| LAYHQWDDA | B | 205 | 223 | CTAGCATACCACCAGTGGGACGACGCT | B | 521 | 1325 | + |
| LAKVASMNA | B | 206 | 224 | CTAGCAAAGGTGGCCAGCATGAACGCT | B | 522 | 1326 | + |
| LANEGTIRA | B | 207 | 225 | CTAGCAAACGAGGGCACCATCCGGGCT | B | 523 | 1327 | + |
| LAGKIEENA | B | 208 | 226 | CTAGCAGGCAAGATCGAGGAGAACGCT | B | 524 | 1328 | + |
| LAPVKHTWA | B | 209 | 227 | CTAGCACCCGTGAAGCACACCTGGGCT | B | 525 | 1329 | + |
| LADEGREHA | B | 210 | 228 | CTAGCAGACGAGGGCCGGGAGCACGCT | B | 526 | 1330 | + |
| LALNNDQSA | B | 211 | 229 | CTAGCACTGAACAACGACCAGAGCGCT | B | 527 | 1331 | + |
| LADVVSVSA | B | 212 | 230 | CTAGCAGACGTGGTGAGCGTGAGCGCT | B | 528 | 1332 | + |
| LAPSKMGLA | B | 213 | 231 | CTAGCACCCAGCAAGATGGGCCTGGCT | B | 529 | 1333 | + |
| LASACMRAA | B | 214 | 232 | CTAGCAAGCGCCTGCATGCGGGCCGCT | B | 530 | 1334 | + |
| LAGDIVRNA | B | 215 | 233 | CTAGCAGGCGACATCGTGCGGAACGCT | B | 531 | 1335 | + |
| LADTYKPYA | B | 216 | 234 | CTAGCAGACACCTACAAGCCCTACGCT | B | 532 | 1336 | + |
| LAFPDKSIA | B | 217 | 235 | CTAGCATTCCCCGACAAGAGCATCGCT | B | 533 | 1337 | + |
| LANADFPLA | B | 218 | 236 | CTAGCAAACGCCGACTTCCCCCTGGCT | B | 534 | 1338 | + |
| LAKEGYRDA | B | 219 | 237 | CTAGCAAAGGAGGGCTACCGGGACGCT | B | 535 | 1339 | + |
| LADPMPTHA | B | 220 | 238 | CTAGCAGACCCCATGCCCACCCACGCT | B | 536 | 1340 | + |
| LAQNQKQIA | B | 221 | 239 | CTAGCACAGAACCAGAAGCAGATCGCT | B | 537 | 1341 | + |
| LASENLNRA | B | 222 | 240 | CTAGCAAGCGAGAACCTGAACCGGGCT | B | 538 | 1342 | + |
| LAFCTPRYA | B | 223 | 241 | CTAGCATTCTGCACCCCCCGGTACGCT | B | 539 | 1343 | + |
| LANLKNFSA | B | 224 | 242 | CTAGCAAACCTGAAGAACTTCAGCGCT | B | 540 | 1344 | + |
| LANAMEKHA | B | 225 | 243 | CTAGCAAACGCCATGGAGAAGCACGCT | B | 541 | 1345 | + |
| LAMHESYNA | B | 226 | 244 | CTAGCAATGCACGAGAGCTACAACGCT | B | 542 | 1346 | + |
| LAMKYVFDA | B | 227 | 245 | CTAGCAATGAAGTACGTGTTCGACGCT | B | 543 | 1347 | + |
| LAKGQAQNA | B | 228 | 246 | CTAGCAAAGGGCCAGGCCCAGAACGCT | B | 544 | 1348 | + |
| LAFRTMEYA | B | 229 | 247 | CTAGCATTCCGGACCATGGAGTACGCT | B | 545 | 1349 | + |
| LAKKVVDGA | B | 230 | 248 | CTAGCAAAGAAGGTGGTGGACGGCGCT | B | 546 | 1350 | + |
| LAKGMKEGA | B | 231 | 249 | CTAGCAAAGGGCATGAAGGAGGGCGCT | B | 547 | 1351 | + |
| LADDQAVNA | B | 232 | 250 | CTAGCAGACGACCAGGCCGTGAACGCT | B | 548 | 1352 | + |
| LANTWCKGA | B | 233 | 251 | CTAGCAAACACCTGGTGCAAGGGCGCT | B | 549 | 1353 | + |
| LANQTTREA | B | 234 | 252 | CTAGCAAACCAGACCACCCGGGAGGCT | B | 550 | 1354 | + |
| LADGIQKNA | B | 235 | 253 | CTAGCAGACGGCATCCAGAAGAACGCT | B | 551 | 1355 | + |
| LAHQGAIIA | B | 236 | 254 | CTAGCACACCAGGGCGCCATCATCGCT | B | 552 | 1356 | + |
| LADNCWCCA | B | 237 | 255 | CTAGCAGACAACTGCTGGTGCTGCGCT | B | 553 | 1357 | + |
| LADVGCENA | B | 238 | 256 | CTAGCAGACGTGGGCTGCGAGAACGCT | B | 554 | 1358 | + |
| LAGSRVNFA | B | 239 | 257 | CTAGCAGGCAGCCGGGTGAACTTCGCT | B | 555 | 1359 | + |
| LATKSTGSA | B | 240 | 258 | CTAGCAACCAAGAGCACCGGCAGCGCT | B | 556 | 1360 | + |
| LAAHQMASA | B | 241 | 259 | CTAGCAGCCCACCAGATGGCCAGCGCT | B | 557 | 1361 | + |
| LAREDHRQA | B | 242 | 260 | CTAGCACGGGAGGACCACCGGCAGGCT | B | 558 | 1362 | + |
| LAYLPLKYA | B | 243 | 261 | CTAGCATACCTGCCCCTGAAGTACGCT | B | 559 | 1363 | + |
| LALETTQRA | B | 244 | 262 | CTAGCACTGGAGACCACCCAGCGGGCT | B | 560 | 1364 | + |
| LAEGLSQFA | B | 245 | 263 | CTAGCAGAGGGCCTGAGCCAGTTCGCT | B | 561 | 1365 | + |
| LADWRTTPA | B | 246 | 264 | CTAGCAGACTGGCGGACCACCCCCGCT | B | 562 | 1366 | + |
| LAETVKYMA | B | 247 | 265 | CTAGCAGAGACCGTGAAGTACATGGCT | B | 563 | 1367 | + |
| LAAVKAVVA | B | 248 | 266 | CTAGCAGCCGTGAAGGCCGTGGTGGCT | B | 564 | 1368 | + |
| LAKGQSQGA | B | 249 | 267 | CTAGCAAAGGGCCAGAGCCAGGGCGCT | B | 565 | 1369 | + |
| LAVEPGPPA | B | 250 | 268 | CTAGCAGTGGAGCCCGGCCCCCCCGCT | B | 566 | 1370 | + |
| LAAEHKQTA | B | 251 | 269 | CTAGCAGCCGAGCACAAGCAGACCGCT | B | 567 | 1371 | + |
| LAHYPSAPA | B | 252 | 270 | CTAGCACACTACCCCAGCGCCCCCGCT | B | 568 | 1372 | + |
| LATRADIFA | B | 253 | 271 | CTAGCAACCCGGGCCGACATCTTCGCT | B | 569 | 1373 | + |
| LAYLRALKA | B | 254 | 272 | CTAGCATACCTGCGGGCCCTGAAGGCT | B | 570 | 1374 | + |
| LAQNQWTDA | B | 255 | 273 | CTAGCACAGAACCAGTGGACCGACGCT | B | 571 | 1375 | + |
| LAGGAWDWA | B | 256 | 274 | CTAGCAGGCGGCGCCTGGGACTGGGCT | B | 572 | 1376 | + |
| LADENLQAA | B | 257 | 275 | CTAGCAGACGAGAACCTGCAGGCCGCT | B | 573 | 1377 | + |
| LANRLSNVA | B | 258 | 276 | CTAGCAAACCGGCTGAGCAACGTGGCT | B | 574 | 1378 | + |
| LAEPPDPPA | B | 259 | 277 | CTAGCAGAGCCCCCCGACCCCCCCGCT | B | 575 | 1379 | + |
| LAQEAKLTA | B | 260 | 278 | CTAGCACAGGAGGCCAAGCTGACCGCT | B | 576 | 1380 | + |
| LAHTPDTFA | B | 261 | 279 | CTAGCACACACCCCCGACACCTTCGCT | B | 577 | 1381 | + |
| LAGESSYLA | B | 262 | 280 | CTAGCAGGCGAGAGCAGCTACCTGGCT | B | 578 | 1382 | + |
| LADLTLRAA | B | 263 | 281 | CTAGCAGACCTGACCCTGCGGGCCGCT | B | 579 | 1383 | + |
| LAKRDKPTA | B | 264 | 282 | CTAGCAAAGCGGGACAAGCCCACCGCT | B | 580 | 1384 | + |
| LANRWAIDA | B | 265 | 283 | CTAGCAAACCGGTGGGCCATCGACGCT | B | 581 | 1385 | + |
| LACRSDCVA | B | 266 | 284 | CTAGCATGCCGGAGCGACTGCGTGGCT | B | 582 | 1386 | + |
| LAKPTGKDA | B | 267 | 285 | CTAGCAAAGCCCACCGGCAAGGACGCT | B | 583 | 1387 | + |
| LAGHKHDEA | B | 268 | 286 | CTAGCAGGCCACAAGCACGACGAGGCT | B | 584 | 1388 | + |
| LAAQDVSWA | B | 269 | 287 | CTAGCAGCCCAGGACGTGAGCTGGGCT | B | 585 | 1389 | + |
| LADVGCENA | B | 270 | 288 | CTAGCAGACGTGGGCTGCGAGAACGCT | B | 586 | 1390 | + |
| LAKGPASIA | B | 271 | 289 | CTAGCAAAGGGCCCCGCCAGCATCGCT | B | 587 | 1391 | + |
| LAGPQRFQA | B | 272 | 290 | CTAGCAGGCCCCCAGCGGTTCCAGGCT | B | 588 | 1392 | + |
| LAATICTEA | B | 273 | 291 | CTAGCAGCCACCATCTGCACCGAGGCT | B | 589 | 1393 | + |
| LAMTNTFLA | B | 274 | 292 | CTAGCAATGACCAACACCTTCCTGGCT | B | 590 | 1394 | + |
| LAKGMKEGA | B | 275 | 293 | CTAGCAAAGGGCATGAAGGAGGGCGCT | B | 591 | 1395 | + |
| LAKGVTTAA | B | 276 | 294 | CTAGCAAAGGGCGTGACCACCGCCGCT | B | 592 | 1396 | + |
| LARFRGMCA | B | 277 | 295 | CTAGCACGGTTCCGGGGCATGTGCGCT | B | 593 | 1397 | + |
| TSHVSTSS | B | 278 | 296 | ACCAGCCACGTGAGCACCAGCAGC | B | 594 | 1398 | +++ |
| SGVLFTEG | B | 279 | 297 | AGCGGCGTGCTGTTCACCGAGGGC | B | 595 | 1399 | +++ |
| TSGMGAIG | B | 280 | 298 | ACCAGCGGCATGGGCGCCATCGGC | B | 596 | 1400 | +++ |
| TGDSEQQT | B | 281 | 299 | ACCGGCGACAGCGAGCAGCAGACC | B | 597 | 1401 | +++ |
| SGPGTSGT | B | 282 | 300 | AGCGGCCCCGGCACCAGCGGCACC | B | 598 | 1402 | +++ |
| SGSVGYVG | B | 283 | 301 | AGCGGCAGCGTGGGCTACGTGGGC | B | 599 | 1403 | +++ |
| TGEGPTKG | B | 284 | 302 | ACCGGCGAGGGCCCCACCAAGGGC | B | 600 | 1404 | +++ |
| TGDKWPQG | B | 285 | 303 | ACCGGCGACAAGTGGCCCCAGGGC | B | 601 | 1405 | +++ |
| SGEMTKPG | B | 286 | 304 | AGCGGCGAGATGACCAAGCCCGGC | B | 602 | 1406 | ++ |
| TTENHKPG | B | 287 | 305 | ACCACCGAGAACCACAAGCCCGGC | B | 603 | 1407 | ++ |
| SGREIHFG | B | 288 | 306 | AGCGGCCGGGAGATCCACTTCGGC | B | 604 | 1408 | ++ |
| SSENNKGG | B | 289 | 307 | AGCAGCGAGAACAACAAGGGCGGC | B | 605 | 1409 | ++ |
| TSQEKQNS | B | 290 | 308 | ACCAGCCAGGAGAAGCAGAACAGC | B | 606 | 1410 | ++ |
| GTMFNNST | B | 291 | 309 | GGCACCATGTTCAACAACAGCACC | B | 607 | 1411 | + |
| TTGMERPT | B | 292 | 310 | ACCACCGGCATGGAGCGGCCCACC | B | 608 | 1412 | + |
| SGPKETGG | B | 293 | 311 | AGCGGCCCCAAGGAGACCGGCGGC | B | 609 | 1413 | + |
| SGIDTRLG | B | 294 | 312 | AGCGGCATCGACACCCGGCTGGGC | B | 610 | 1414 | + |
| STVPLNMG | B | 295 | 313 | AGCACCGTGCCCCTGAACATGGGC | B | 611 | 1415 | + |
| TGIATSYS | B | 296 | 314 | ACCGGCATCGCCACCAGCTACAGC | B | 612 | 1416 | + |
| TGDERKPG | B | 297 | 315 | ACCGGCGACGAGCGGAAGCCCGGC | B | 613 | 1417 | + |
| TGPGTHNG | B | 298 | 316 | ACCGGCCCCGGCACCCACAACGGC | B | 614 | 1418 | + |
| STTKPM | B | 299 | 317 | AGCACCACCAAGCCCATG | B | 615 | 1419 | +++ |
| CKEITR | B | 300 | 318 | TGCAAGGAGATCACCCGG | B | 616 | 1420 | +++ |
| SKMRPA | B | 301 | 319 | AGCAAGATGCGGCCCGCC | B | 617 | 1421 | +++ |
| PPNQYI | B | 302 | 320 | CCCCCCAACCAGTACATC | B | 618 | 1422 | +++ |
| PDVSLL | B | 303 | 321 | CCCGACGTGAGCCTGCTG | B | 619 | 1423 | +++ |
| HSKDGA | B | 304 | 322 | CACAGCAAGGACGGCGCC | B | 620 | 1424 | +++ |
| KFRHTE | B | 305 | 323 | AAGTTCCGGCACACCGAG | B | 621 | 1425 | +++ |
| LWMTTV | B | 306 | 324 | CTGTGGATGACCACCGTG | B | 622 | 1426 | +++ |
| RPGRVS | B | 307 | 325 | CGGCCCGGCCGGGTGAGC | B | 623 | 1427 | +++ |
| NIKKAA | B | 308 | 326 | AACATCAAGAAGGCCGCC | B | 624 | 1428 | +++ |
| RLGRLS | B | 309 | 327 | CGGCTGGGCCGGCTGAGC | B | 625 | 1429 | ++ |
| FNKVLH | B | 310 | 328 | TTCAACAAGGTGCTGCAC | B | 626 | 1430 | ++ |
| RTGRNT | B | 311 | 329 | CGGACCGGCCGGAACACC | B | 627 | 1431 | ++ |
| RALKIS | B | 312 | 330 | CGGGCCCTGAAGATCAGC | B | 628 | 1432 | ++ |
| RLGKVP | B | 313 | 331 | CGGCTGGGCAAGGTGCCC | B | 629 | 1433 | + |
| KFTKAA | B | 314 | 332 | AAGTTCACCAAGGCCGCC | B | 630 | 1434 | + |
| HFPVFS | B | 315 | 333 | CACTTCCCCGTGTTCAGC | B | 631 | 1435 | + |
| NSKKLG | B | 316 | 334 | AACAGCAAGAAGCTGGGC | B | 632 | 1436 | + |
| KAMRTG | B | 317 | 335 | AAGGCCATGCGGACCGGC | B | 633 | 1437 | + |

*AAV2 vectors designed to include SEQ ID NO: 1 with the indicated sequence inclusion. The 8-mers and 9-mers were inserted between amino acid residues 587 and 588 of SEQ ID NO: 1, and the 6-mers were used as replacements for amino acid residues 585 to 590 of SEQ ID NO: 1.
+++ means that the modified AAV2 vectors had a performance that placed them within the top 1/3 of the rescued AAV vectors;
++ means the AAV2 vectors had a performance that placed them within the middle 1/3 of the rescued AAV vectors; and
+ means the AAV2 vectors had a performance that placed them within the bottom 1/3 of the rescued AAV vectors.
**SEQ ID NOs used for Sequence Listing.

TABLE 1C
Amino acid sequences that can be inserted into an AAV capsid polypeptide.

| | | | SEQ | | | | SEQ | |
|---|---|---|---|---|---|---|---|---|
| | SEQ | | ID | | | | ID | |
| Amino Acid | ID | | NO: | Nucleic Acid Sequence encoding the Amino | SEQ ID | | NO: | Activity |
| Sequence | NO: | | ** | Acid Sequence | NO: | | ** | Level* |
| LAEFRVGQA | C | 2 | 336 | CTAGCAGAGTTCCGGGTGGGCCAGGCT | C | 46 | 1438 | +++ |
| LAGIQQHVA | C | 3 | 337 | CTAGCAGGCATCCAGCAGCACGTGGCT | C | 47 | 1439 | +++ |
| LAQVTEMRA | C | 4 | 338 | CTAGCACAGGTGACCGAGATGCGGGCT | C | 48 | 1440 | +++ |
| LAFNGSTSA | C | 5 | 339 | CTAGCATTCAACGGCAGCACCAGCGCT | C | 49 | 1441 | +++ |
| LAKGFKTEA | C | 6 | 340 | CTAGCAAAGGGCTTCAAGACCGAGGCT | C | 50 | 1442 | +++ |
| LAAGQAQSA | C | 7 | 341 | CTAGCAGCCGGCCAGGCCCAGAGCGCT | C | 51 | 1443 | +++ |
| LAFLRGPEA | C | 8 | 342 | CTAGCATTCCTGCGGGGCCCCGAGGCT | C | 52 | 1444 | +++ |
| LAQVQVEGA | C | 9 | 343 | CTAGCACAGGTGCAGGTGGAGGGCGCT | C | 53 | 1445 | +++ |
| LAGSMAKLA | C | 10 | 344 | CTAGCAGGCAGCATGGCCAAGCTGGCT | C | 54 | 1446 | +++ |
| LAGHAACFA | C | 11 | 345 | CTAGCAGGCCACGCCGCCTGCTTCGCT | C | 55 | 1447 | +++ |
| LAVNRVDMA | C | 12 | 346 | CTAGCAGTGAACCGGGTGGACATGGCT | C | 56 | 1448 | +++ |
| LAGFHAIEA | C | 13 | 347 | CTAGCAGGCTTCCACGCCATCGAGGCT | C | 57 | 1449 | +++ |
| LAYFHSYAA | C | 14 | 348 | CTAGCATACTTCCACAGCTACGCCGCT | C | 58 | 1450 | +++ |
| LADHGNKPA | C | 15 | 349 | CTAGCAGACCACGGCAACAAGCCCGCT | C | 59 | 1451 | ++ |
| LAPIQLAQA | C | 16 | 350 | CTAGCACCCATCCAGCTGGCCCAGGCT | C | 60 | 1452 | ++ |
| LAPLQTQEA | C | 18 | 351 | CTAGCACCCCTGCAGACCCAGGAGGCT | C | 61 | 1453 | ++ |
| LAEQVLEKA | C | 19 | 352 | CTAGCAGAGCAGGTGCTGGAGAAGGCT | C | 62 | 1454 | ++ |
| LAFPCIKEA | C | 20 | 353 | CTAGCATTCCCCTGCATCAAGGAGGCT | C | 63 | 1455 | ++ |
| LAQVEVSKA | C | 21 | 354 | CTAGCACAGGTGGAGGTGAGCAAGGCT | C | 64 | 1456 | ++ |
| LAKDGGKIA | C | 22 | 355 | CTAGCAAAGGACGGCGGCAAGATCGCT | C | 65 | 1457 | ++ |
| LAKVASMNA | C | 23 | 356 | CTAGCAAAGGTGGCCAGCATGAACGCT | C | 66 | 1458 | ++ |
| LADEGREHA | C | 24 | 357 | CTAGCAGACGAGGGCCGGGAGCACGCT | C | 67 | 1459 | ++ |
| LASACMRAA | C | 25 | 358 | CTAGCAAGCGCCTGCATGCGGGCCGCT | C | 68 | 1460 | ++ |
| LAGDIVRNA | C | 26 | 359 | CTAGCAGGCGACATCGTGCGGAACGCT | C | 69 | 1461 | ++ |
| LADPMPTHA | C | 27 | 360 | CTAGCAGACCCCATGCCCACCCACGCT | C | 70 | 1462 | ++ |
| LAFCTPRYA | C | 28 | 361 | CTAGCATTCTGCACCCCCCGGTACGCT | C | 71 | 1463 | ++ |
| LANAMEKHA | C | 29 | 362 | CTAGCAAACGCCATGGAGAAGCACGCT | C | 72 | 1464 | + |
| LAMHESYNA | C | 30 | 363 | CTAGCAATGCACGAGAGCTACAACGCT | C | 73 | 1465 | + |
| LAKGQAQNA | C | 31 | 364 | CTAGCAAAGGGCCAGGCCCAGAACGCT | C | 74 | 1466 | + |
| LADDQAVNA | C | 32 | 365 | CTAGCAGACGACCAGGCCGTGAACGCT | C | 75 | 1467 | + |
| LADGIQKNA | C | 33 | 366 | CTAGCAGACGGCATCCAGAAGAACGCT | C | 76 | 1468 | 1 |
| LAAHQMASA | C | 34 | 367 | CTAGCAGCCCACCAGATGGCCAGCGCT | C | 77 | 1469 | + |
| LAETVKYMA | C | 35 | 368 | CTAGCAGAGACCGTGAAGTACATGGCT | C | 78 | 1470 | + |
| LAKGQSQGA | C | 36 | 369 | CTAGCAAAGGGCCAGAGCCAGGGCGCT | C | 79 | 1471 | + |
| LAVEPGPPA | C | 37 | 370 | CTAGCAGTGGAGCCCGGCCCCCCCGCT | C | 80 | 1472 | + |
| LAAEHKQTA | C | 38 | 371 | CTAGCAGCCGAGCACAAGCAGACCGCT | C | 81 | 1473 | + |
| LAEPPDPPA | C | 39 | 372 | CTAGCAGAGCCCCCCGACCCCCCCGCT | C | 82 | 1474 | + |
| LAHTPDTFA | C | 40 | 373 | CTAGCACACACCCCCGACACCTTCGCT | C | 83 | 1475 | + |
| LAKGPASIA | C | 41 | 374 | CTAGCAAAGGGCCCCGCCAGCATCGCT | C | 84 | 1476 | + |
| LAKGMKEGA | C | 42 | 375 | CTAGCAAAGGGCATGAAGGAGGGCGCT | C | 85 | 1477 | + |
| LAKGVTTAA | C | 43 | 376 | CTAGCAAAGGGCGTGACCACCGCCGCT | C | 86 | 1478 | + |
| NSKKLG | C | 44 | 377 | AACAGCAAGAAGCTGGGC | C | 87 | 1479 | + |
| KAMRTG | C | 45 | 378 | AAGGCCATGCGGACCGGC | C | 88 | 1480 | + |

*AAV2 vectors designed to include SEQ ID NO: 1 with the indicated sequence inclusion. The 9-mers were inserted between amino acid residues 587 and 588 of SEQ ID NO: 1, and the 6-mers were used as replacements for amino acid residues 585 to 590 of SEQ ID NO: 1. +++ means that the modified AAV2 vectors had a performance that placed them within the top 1/3 of the rescued AAV vectors; ++ means the AAV2 vectors had a performance that placed them within the middle 1/3 of the rescued AAV vectors; and + means the AAV2 vectors had a performance that placed them within the bottom 1/3 of the rescued AAV vectors.
**SEQ ID NOs used for Sequence Listing.

TABLE 1D
Amino acid sequences that can be inserted into an AAV capsid polypeptide.

| | | | SEQ | | | | SEQ | |
|---|---|---|---|---|---|---|---|---|
| | SEQ | | ID | | | | ID | |
| Amino Acid | ID | | NO: | Nucleic Acid Sequence encoding the Amino | SEQ ID | | NO: | Activity |
| Sequence | NO: | | ** | Acid Sequence | NO: | | ** | Level* |
| LAKINAQPA | D | 2 | 379 | CTAGCAAAGATCAACGCCCAGCCCGCT | D | 79 | 1481 | +++ |
| LAEEEKYGA | D | 3 | 380 | CTAGCAGAGGAGGAGAAGTACGGCGCT | D | 80 | 1482 | +++ |
| LALEVGDHA | D | 4 | 381 | CTAGCACTGGAGGTGGGCGACCACGCT | D | 81 | 1483 | +++ |
| LAIGSDTSA | D | 5 | 382 | CTAGCAATCGGCAGCGACACCAGCGCT | D | 82 | 1484 | +++ |
| LAAVHLMGA | D | 6 | 383 | CTAGCAGCCGTGCACCTGATGGGCGCT | D | 83 | 1485 | +++ |
| LAVRNEINA | D | 7 | 384 | CTAGCAGTGCGGAACGAGATCAACGCT | D | 84 | 1486 | +++ |
| LAQVKQGPA | D | 8 | 385 | CTAGCACAGGTGAAGCAGGGCCCCGCT | D | 85 | 1487 | +++ |
| LANKNTAIA | D | 9 | 386 | CTAGCAAACAAGAACACCGCCATCGCT | D | 86 | 1488 | +++ |
| LAEHKNMHA | D | 10 | 387 | CTAGCAGAGCACAAGAACATGCACGCT | D | 87 | 1489 | +++ |
| LAEVTYTGA | D | 11 | 388 | CTAGCAGAGGTGACCTACACCGGCGCT | D | 88 | 1490 | +++ |
| LASADHQPA | D | 12 | 389 | CTAGCAAGCGCCGACCACCAGCCCGCT | D | 89 | 1491 | +++ |
| LAEFDGDGA | D | 13 | 390 | CTAGCAGAGTTCGACGGCGACGGCGCT | D | 90 | 1492 | +++ |
| LADFPSEKA | D | 14 | 391 | CTAGCAGACTTCCCCAGCGAGAAGGCT | D | 91 | 1493 | +++ |
| LALDMWEPA | D | 15 | 392 | CTAGCACTGGACATGTGGGAGCCCGCT | D | 92 | 1494 | +++ |
| LAKFAAKDA | D | 16 | 393 | CTAGCAAAGTTCGCCGCCAAGGACGCT | D | 93 | 1495 | +++ |
| LANNAEPSA | D | 17 | 394 | CTAGCAAACAACGCCGAGCCCAGCGCT | D | 94 | 1496 | +++ |
| LAHDWGAPA | D | 18 | 395 | CTAGCACACGACTGGGGCGCCCCCGCT | D | 95 | 1497 | +++ |
| LAMDREIKA | D | 19 | 396 | CTAGCAATGGACCGGGAGATCAAGGCT | D | 96 | 1498 | +++ |
| LAQGNNTGA | D | 20 | 397 | CTAGCACAGGGCAACAACACCGGCGCT | D | 97 | 1499 | +++ |
| LADNLNTPA | D | 21 | 398 | CTAGCAGACAACCTGAACACCCCCGCT | D | 98 | 1500 | +++ |
| LAAANHDNA | D | 22 | 399 | CTAGCAGCCGCCAACCACGACAACGCT | D | 99 | 1501 | +++ |
| LAVPKADAA | D | 23 | 400 | CTAGCAGTGCCCAAGGCCGACGCCGCT | D | 100 | 1502 | +++ |
| LAVFQETGA | D | 24 | 401 | CTAGCAGTGTTCCAGGAGACCGGCGCT | D | 101 | 1503 | +++ |
| LAAVKAVVA | D | 25 | 402 | CTAGCAGCCGTGAAGGCCGTGGTGGCT | D | 102 | 1504 | +++ |
| LADNCWCCA | D | 26 | 403 | CTAGCAGACAACTGCTGGTGCTGCGCT | D | 103 | 1505 | +++ |
| LAHAGSSSA | D | 27 | 404 | CTAGCACACGCCGGCAGCAGCAGCGCT | D | 104 | 1506 | +++ |
| LAGIQQHVA | D | 28 | 405 | CTAGCAGGCATCCAGCAGCACGTGGCT | D | 105 | 1507 | ++ |
| LAHDLHGGA | D | 29 | 406 | CTAGCACACGACCTGCACGGCGGCGCT | D | 106 | 1508 | ++ |
| LAMHESYNA | D | 30 | 407 | CTAGCAATGCACGAGAGCTACAACGCT | D | 107 | 1509 | ++ |
| LATPNVNAA | D | 31 | 408 | CTAGCAACCCCCAACGTGAACGCCGCT | D | 108 | 1510 | ++ |
| LAFNGSTSA | D | 32 | 409 | CTAGCATTCAACGGCAGCACCAGCGCT | D | 109 | 1511 | ++ |
| LAEGLSQFA | D | 33 | 410 | CTAGCAGAGGGCCTGAGCCAGTTCGCT | D | 110 | 1512 | ++ |
| LAQVTEMRA | D | 34 | 411 | CTAGCACAGGTGACCGAGATGCGGGCT | D | 111 | 1513 | ++ |
| LAAHQMASA | D | 35 | 412 | CTAGCAGCCCACCAGATGGCCAGCGCT | D | 112 | 1514 | ++ |
| LASACMRAA | D | 36 | 413 | CTAGCAAGCGCCTGCATGCGGGCCGCT | D | 113 | 1515 | ++ |
| LADGIQKNA | D | 37 | 414 | CTAGCAGACGGCATCCAGAAGAACGCT | D | 114 | 1516 | ++ |
| LAHIQEPKA | D | 38 | 415 | CTAGCACACATCCAGGAGCCCAAGGCT | D | 115 | 1517 | ++ |
| LAAGQAQSA | D | 39 | 416 | CTAGCAGCCGGCCAGGCCCAGAGCGCT | D | 116 | 1518 | ++ |
| LADHGNKPA | D | 40 | 417 | CTAGCAGACCACGGCAACAAGCCCGCT | D | 117 | 1519 | ++ |
| LAFLRGPEA | D | 41 | 418 | CTAGCATTCCTGCGGGGCCCCGAGGCT | D | 118 | 1520 | ++ |
| LAETVKYMA | D | 42 | 419 | CTAGCAGAGACCGTGAAGTACATGGCT | D | 119 | 1521 | ++ |
| LADEGREHA | D | 43 | 420 | CTAGCAGACGAGGGCCGGGAGCACGCT | D | 120 | 1522 | ++ |
| LAGDIVRNA | D | 44 | 421 | CTAGCAGGCGACATCGTGCGGAACGCT | D | 121 | 1523 | ++ |
| LAGSMAKLA | D | 45 | 422 | CTAGCAGGCAGCATGGCCAAGCTGGCT | D | 122 | 1524 | ++ |
| LAKGMKEGA | D | 46 | 423 | CTAGCAAAGGGCATGAAGGAGGGCGCT | D | 123 | 1525 | ++ |
| LAEPPDPPA | D | 47 | 424 | CTAGCAGAGCCCCCCGACCCCCCCGCT | D | 124 | 1526 | ++ |
| LATWCLVWA | D | 48 | 425 | CTAGCAACCTGGTGCCTGGTGTGGGCT | D | 125 | 1527 | ++ |
| LAFPCIKEA | D | 49 | 426 | CTAGCATTCCCCTGCATCAAGGAGGCT | D | 126 | 1528 | ++ |
| LAKGFKTEA | D | 50 | 427 | CTAGCAAAGGGCTTCAAGACCGAGGCT | D | 127 | 1529 | + |
| LAKGQSQGA | D | 51 | 428 | CTAGCAAAGGGCCAGAGCCAGGGCGCT | D | 128 | 1530 | + |
| LAEQVLEKA | D | 52 | 429 | CTAGCAGAGCAGGTGCTGGAGAAGGCT | D | 129 | 1531 | + |
| LAKGPASIA | D | 53 | 430 | CTAGCAAAGGGCCCCGCCAGCATCGCT | D | 130 | 1532 | + |
| LAEFRVGQA | D | 54 | 431 | CTAGCAGAGTTCCGGGTGGGCCAGGCT | D | 131 | 1533 | + |
| LAVEPGPPA | D | 55 | 432 | CTAGCAGTGGAGCCCGGCCCCCCCGCT | D | 132 | 1534 | + |
| LAVNRVDMA | D | 56 | 433 | CTAGCAGTGAACCGGGTGGACATGGCT | D | 133 | 1535 | + |
| LAYFHSYAA | D | 57 | 434 | CTAGCATACTTCCACAGCTACGCCGCT | D | 134 | 1536 | + |
| LAHTPDTFA | D | 58 | 435 | CTAGCACACACCCCCGACACCTTCGCT | D | 135 | 1537 | + |
| LAFCTPRYA | D | 59 | 436 | CTAGCATTCTGCACCCCCCGGTACGCT | D | 136 | 1538 | + |
| LAAEHKQTA | D | 60 | 437 | CTAGCAGCCGAGCACAAGCAGACCGCT | D | 137 | 1539 | + |
| LAPIQLAQA | D | 61 | 438 | CTAGCACCCATCCAGCTGGCCCAGGCT | D | 138 | 1540 | + |
| LAQVEVSKA | D | 62 | 439 | CTAGCACAGGTGGAGGTGAGCAAGGCT | D | 139 | 1541 | + |
| LAPLQTQEA | D | 63 | 440 | CTAGCACCCCTGCAGACCCAGGAGGCT | D | 140 | 1542 | + |
| LARAITNEA | D | 64 | 441 | CTAGCACGGGCCATCACCAACGAGGCT | D | 141 | 1543 | + |
| LAGHAACFA | D | 65 | 442 | CTAGCAGGCCACGCCGCCTGCTTCGCT | D | 142 | 1544 | + |
| LAGFHAIEA | D | 66 | 443 | CTAGCAGGCTTCCACGCCATCGAGGCT | D | 143 | 1545 | + |
| LAQVQVEGA | D | 67 | 444 | CTAGCACAGGTGCAGGTGGAGGGCGCT | D | 144 | 1546 | + |
| LANAMEKHA | D | 68 | 445 | CTAGCAAACGCCATGGAGAAGCACGCT | D | 145 | 1547 | + |
| LADPMPTHA | D | 69 | 446 | CTAGCAGACCCCATGCCCACCCACGCT | D | 146 | 1548 | + |
| LAKVASMNA | D | 70 | 447 | CTAGCAAAGGTGGCCAGCATGAACGCT | D | 147 | 1549 | + |
| LAKGQAQNA | D | 71 | 448 | CTAGCAAAGGGCCAGGCCCAGAACGCT | D | 148 | 1550 | + |
| LAKDGGKIA | D | 72 | 449 | CTAGCAAAGGACGGCGGCAAGATCGCT | D | 149 | 1551 | + |
| LADDQAVNA | D | 73 | 450 | CTAGCAGACGACCAGGCCGTGAACGCT | D | 150 | 1552 | + |
| LAKGVTTAA | D | 74 | 451 | CTAGCAAAGGGCGTGACCACCGCCGCT | D | 151 | 1553 | + |
| SGPKETGG | D | 75 | 452 | AGCGGCCCCAAGGAGACCGGCGGC | D | 152 | 1554 | ++ |
| TGPGTHNG | D | 76 | 453 | ACCGGCCCCGGCACCCACAACGGC | D | 153 | 1555 | ++ |
| NSKKLG | D | 77 | 454 | AACAGCAAGAAGCTGGGC | D | 154 | 1556 | + |
| KAMRTG | D | 78 | 455 | AAGGCCATGCGGACCGGC | D | 155 | 1557 | + |

*AAV2 vectors designed to include SEQ ID NO: 1 with the indicated sequence inclusion. The 8-mers and 9-mers were inserted between amino acid residues 587 and 588 of SEQ ID NO: 1, and the 6-mers were used as replacements for amino acid residues 585 to 590 of SEQ ID NO: 1. +++ means that the modified AAV2 vectors had a performance that placed them within the top 1/3 of the rescued AAV vectors; ++ means the AAV2 vectors had a performance that placed them within the middle 1/3 of the rescued AAV vectors; and + means the AAV2 vectors had a performance that placed them within the bottom 1/3 of the rescued AAV vectors.
**SEQ ID NOs used for Sequence Listing.

TABLE 1E
Amino acid sequences that can be inserted into an AAV capsid polypeptide.

| | | | SEQ | | | | SEQ | |
|---|---|---|---|---|---|---|---|---|
| | SEQ | | ID | | SEQ | | ID | |
| Amino Acid | ID | | NO: | Nucleic Acid Sequence encoding the Amino | ID | | NO: | Activity |
| Sequence | NO: | | ** | Acid Sequence | NO: | | ** | Level* |
| LAELALIKA | E | 2 | 456 | CTAGCAGAGCTGGCCCTGATCAAGGCT | E | 84 | 1558 | +++ |
| LADLSDHHA | E | 3 | 457 | CTAGCAGACCTGAGCGACCACCACGCT | E | 85 | 1559 | +++ |
| LADPLYAVA | E | 4 | 458 | CTAGCAGACCCCCTGTACGCCGTGGCT | E | 86 | 1560 | +++ |
| LAPMRGVYA | E | 5 | 459 | CTAGCACCCATGCGGGGCGTGTACGCT | E | 87 | 1561 | +++ |
| LAITQSDIA | F | 6 | 460 | CTAGCAATCACCCAGAGCGACATCGCT | F | 88 | 1562 | +++ |
| LADDMIFVA | E | 7 | 461 | CTAGCAGACGACATGATCTTCGTGGCT | E | 89 | 1563 | +++ |
| LAEFRVGQA | E | 8 | 462 | CTAGCAGAGTTCCGGGTGGGCCAGGCT | E | 90 | 1564 | +++ |
| LAKALGMEA | E | 9 | 463 | CTAGCAAAGGCCCTGGGCATGGAGGCT | E | 91 | 1565 | +++ |
| LACPVAEWA | E | 10 | 464 | CTAGCATGCCCCGTGGCCGAGTGGGCT | E | 92 | 1566 | +++ |
| LANEAQGKA | E | 11 | 465 | CTAGCAAACGAGGCCCAGGGCAAGGCT | E | 93 | 1567 | +++ |
| LAQVTEMRA | E | 12 | 466 | CTAGCACAGGTGACCGAGATGCGGGCT | E | 94 | 1568 | +++ |
| LAIGERTTA | E | 13 | 467 | CTAGCAATCGGCGAGCGGACCACCGCT | E | 95 | 1569 | +++ |
| LANLKENEA | E | 14 | 468 | CTAGCAAACCTGAAGGAGAACGAGGCT | E | 96 | 1570 | +++ |
| LAFNGSTSA | E | 15 | 469 | CTAGCATTCAACGGCAGCACCAGCGCT | E | 97 | 1571 | +++ |
| LAQEQNAAA | E | 16 | 470 | CTAGCACAGGAGCAGAACGCCGCCGCT | E | 98 | 1572 | +++ |
| LAPTTIGGA | E | 17 | 471 | CTAGCACCCACCACCATCGGCGGCGCT | E | 99 | 1573 | +++ |
| LAPSGDRHA | E | 18 | 472 | CTAGCACCCAGCGGCGACCGGCACGCT | E | 100 | 1574 | +++ |
| LAKDHHVIA | E | 19 | 473 | CTAGCAAAGGACCACCACGTGATCGCT | E | 101 | 1575 | +++ |
| LAQKKLLEA | E | 20 | 474 | CTAGCACAGAAGAAGCTGCTGGAGGCT | E | 102 | 1576 | +++ |
| LAFLRGPEA | E | 21 | 475 | CTAGCATTCCTGCGGGGCCCCGAGGCT | E | 103 | 1577 | ++ |
| LARSSTLNA | E | 22 | 476 | CTAGCACGGAGCAGCACCCTGAACGCT | E | 104 | 1578 | ++ |
| LAHIQEPKA | E | 23 | 477 | CTAGCACACATCCAGGAGCCCAAGGCT | E | 105 | 1579 | ++ |
| LAQVQVEGA | E | 24 | 478 | CTAGCACAGGTGCAGGTGGAGGGCGCT | E | 106 | 1580 | ++ |
| LAPNTPKIA | E | 25 | 479 | CTAGCACCCAACACCCCCAAGATCGCT | F | 107 | 1581 | ++ |
| LAVNRVDMA | E | 26 | 480 | CTAGCAGTGAACCGGGTGGACATGGCT | E | 108 | 1582 | ++ |
| LAGFHAIEA | E | 27 | 481 | CTAGCAGGCTTCCACGCCATCGAGGCT | E | 109 | 1583 | ++ |
| LAEGMTGIA | E | 28 | 482 | CTAGCAGAGGGCATGACCGGCATCGCT | E | 110 | 1584 | ++ |
| LAGEVTKHA | E | 29 | 483 | CTAGCAGGCGAGGTGACCAAGCACGCT | E | 111 | 1585 | ++ |
| LAYFHSYAA | E | 30 | 484 | CTAGCATACTTCCACAGCTACGCCGCT | E | 112 | 1586 | ++ |
| LAPLQTQEA | E | 31 | 485 | CTAGCACCCCTGCAGACCCAGGAGGCT | E | 113 | 1587 | ++ |
| LAFPCIKEA | E | 32 | 486 | CTAGCATTCCCCTGCATCAAGGAGGCT | F | 114 | 1588 | ++ |
| LAQVEVSKA | E | 33 | 487 | CTAGCACAGGTGGAGGTGAGCAAGGCT | E | 115 | 1589 | ++ |
| LAPGNDLWA | E | 34 | 488 | CTAGCACCCGGCAACGACCTGTGGGCT | E | 116 | 1590 | ++ |
| LAKDGGKIA | E | 35 | 489 | CTAGCAAAGGACGGCGGCAAGATCGCT | E | 117 | 1591 | ++ |
| LAKVASMNA | E | 36 | 490 | CTAGCAAAGGTGGCCAGCATGAACGCT | E | 118 | 1592 | ++ |
| LAGKIEENA | E | 37 | 491 | CTAGCAGGCAAGATCGAGGAGAACGCT | E | 119 | 1593 | ++ |
| LAPVKHTWA | E | 38 | 492 | CTAGCACCCGTGAAGCACACCTGGGCT | E | 120 | 1594 | ++ |
| LALNNDQSA | E | 39 | 493 | CTAGCACTGAACAACGACCAGAGCGCT | E | 121 | 1595 | ++ |
| LAGDIVRNA | E | 40 | 494 | CTAGCAGGCGACATCGTGCGGAACGCT | E | 122 | 1596 | ++ |
| LANADFPLA | E | 41 | 495 | CTAGCAAACGCCGACTTCCCCCTGGCT | E | 123 | 1597 | ++ |
| LAKEGYRDA | E | 42 | 496 | CTAGCAAAGGAGGGCTACCGGGACGCT | E | 124 | 1598 | ++ |
| LADPMPTHA | E | 43 | 497 | CTAGCAGACCCCATGCCCACCCACGCT | E | 125 | 1599 | ++ |
| LAFCTPRYA | E | 44 | 498 | CTAGCATTCTGCACCCCCCGGTACGCT | E | 126 | 1600 | + |
| LANLKNFSA | F | 45 | 499 | CTAGCAAACCTGAAGAACTTCAGCGCT | E | 127 | 1601 | + |
| LANAMEKHA | F | 46 | 500 | CTAGCAAACGCCATGGAGAAGCACGCT | E | 128 | 1602 | + |
| LAKGQAQNA | E | 47 | 501 | CTAGCAAAGGGCCAGGCCCAGAACGCT | E | 129 | 1603 | + |
| LADDQAVNA | E | 48 | 502 | CTAGCAGACGACCAGGCCGTGAACGCT | E | 130 | 1604 | + |
| LANTWCKGA | E | 49 | 503 | CTAGCAAACACCTGGTGCAAGGGCGCT | E | 131 | 1605 | + |
| LADVGCENA | E | 50 | 504 | CTAGCAGACGTGGGCTGCGAGAACGCT | E | 132 | 1606 | + |
| LAGSRVNFA | E | 51 | 505 | CTAGCAGGCAGCCGGGTGAACTTCGCT | E | 133 | 1607 | + |
| LAAHQMASA | E | 52 | 506 | CTAGCAGCCCACCAGATGGCCAGCGCT | E | 134 | 1608 | + |
| LAREDHRQA | E | 53 | 507 | CTAGCACGGGAGGACCACCGGCAGGCT | E | 135 | 1609 | + |
| LAVEPGPPA | E | 54 | 508 | CTAGCAGTGGAGCCCGGCCCCCCCGCT | E | 136 | 1610 | + |
| LATRADIFA | E | 55 | 509 | CTAGCAACCCGGGCCGACATCTTCGCT | E | 137 | 1611 | + |
| LAQNQWTDA | E | 56 | 510 | CTAGCACAGAACCAGTGGACCGACGCT | E | 138 | 1612 | + |
| LADENLQAA | E | 57 | 511 | CTAGCAGACGAGAACCTGCAGGCCGCT | E | 139 | 1613 | + |
| LAEPPDPPA | E | 58 | 512 | CTAGCAGAGCCCCCCGACCCCCCCGCT | E | 140 | 1614 | + |
| LAQEAKLTA | E | 59 | 513 | CTAGCACAGGAGGCCAAGCTGACCGCT | E | 141 | 1615 | + |
| LAHTPDTFA | E | 60 | 514 | CTAGCACACACCCCCGACACCTTCGCT | E | 142 | 1616 | + |
| LADLTLRAA | E | 61 | 515 | CTAGCAGACCTGACCCTGCGGGCCGCT | E | 143 | 1617 | + |
| LANRWAIDA | E | 62 | 516 | CTAGCAAACCGGTGGGCCATCGACGCT | E | 144 | 1618 | + |
| LAKPTGKDA | E | 63 | 517 | CTAGCAAAGCCCACCGGCAAGGACGCT | E | 145 | 1619 | + |
| LAKGPASIA | E | 64 | 518 | CTAGCAAAGGGCCCCGCCAGCATCGCT | E | 146 | 1620 | + |
| LAKGVTTAA | E | 65 | 519 | CTAGCAAAGGGCGTGACCACCGCCGCT | E | 147 | 1621 | + |
| TSHVSTSS | E | 66 | 520 | ACCAGCCACGTGAGCACCAGCAGC | F | 148 | 1622 | +++ |
| SGVLFTEG | E | 67 | 521 | AGCGGCGTGCTGTTCACCGAGGGC | E | 149 | 1623 | +++ |
| SGPGTSGT | E | 68 | 522 | AGCGGCCCCGGCACCAGCGGCACC | E | 150 | 1624 | +++ |
| TGEGPTKG | E | 69 | 523 | ACCGGCGAGGGCCCCACCAAGGGC | E | 151 | 1625 | +++ |
| TGDKWPQG | E | 70 | 524 | ACCGGCGACAAGTGGCCCCAGGGC | E | 152 | 1626 | +++ |
| SGREIHFG | E | 71 | 525 | AGCGGCCGGGAGATCCACTTCGGC | E | 153 | 1627 | ++ |
| TSQEKQNS | E | 72 | 526 | ACCAGCCAGGAGAAGCAGAACAGC | E | 154 | 1628 | ++ |
| GTMFNNST | E | 73 | 527 | GGCACCATGTTCAACAACAGCACC | E | 155 | 1629 | ++ |
| TTGMERPT | E | 74 | 528 | ACCACCGGCATGGAGCGGCCCACC | E | 156 | 1630 | ++ |
| TGDERKPG | E | 75 | 529 | ACCGGCGACGAGCGGAAGCCCGGC | E | 157 | 1631 | + |
| CKEITR | E | 76 | 530 | TGCAAGGAGATCACCCGG | E | 158 | 1632 | +++ |
| PDVSLL | E | 77 | 531 | CCCGACGTGAGCCTGCTG | E | 159 | 1633 | +++ |
| RLGRLS | E | 78 | 532 | CGGCTGGGCCGGCTGAGC | E | 160 | 1634 | +++ |
| RLGKVP | E | 79 | 533 | CGGCTGGGCAAGGTGCCC | E | 161 | 1635 | + |
| KFTKAA | E | 80 | 534 | AAGTTCACCAAGGCCGCC | E | 162 | 1636 | + |
| HFPVFS | E | 81 | 535 | CACTTCCCCGTGTTCAGC | E | 163 | 1637 | + |
| NSKKLG | E | 82 | 536 | AACAGCAAGAAGCTGGGC | E | 164 | 1638 | + |
| KAMRTG | E | 83 | 537 | AAGGCCATGCGGACCGGC | E | 165 | 1639 | + |

*AAV2 vectors designed to include SEQ ID NO: 1 with the indicated sequence inclusion. The 8-mers and 9-mers were inserted between amino acid residues 587 and 588 of SEQ ID NO: 1, and the 6-mers were used as replacements for amino acid residues 585 to 590 of SEQ ID NO: 1. +++ means that the modified AAV2 vectors had a performance that placed them within the top 1/3 of the rescued AAV vectors; ++ means the AAV2 vectors had a performance that placed them within the middle 1/3 of the rescued AAV vectors; and + means the AAV2 vectors had a performance that placed them within the bottom 1/3 of the rescued AAV vectors.
**SEQ ID NOs used for Sequence Listing.

TABLE 1F
Amino acid sequences that can be inserted into an AAV capsid polypeptide.

| | | | SEQ | | | | SEQ | |
|---|---|---|---|---|---|---|---|---|
| | SEQ | | ID | | SEQ | | ID | |
| Amino Acid | ID | | NO: | Nucleic Acid Sequence encoding the Amino | ID | | NO: | Activity |
| Sequence | NO: | | ** | Acid Sequence | NO: | | ** | Level* |
| LAFNSCSYA | F | 2 | 538 | CTAGCATTCAACAGCTGCAGCTACGCT | F | 11 | 1640 | +++ |
| LAGGAWDWA | F | 3 | 539 | CTAGCAGGCGGCGCCTGGGACTGGGCT | F | 12 | 1641 | +++ |
| LANADFPLA | F | 4 | 540 | CTAGCAAACGCCGACTTCCCCCTGGCT | F | 13 | 1642 | +++ |
| LAAQDVSWA | F | 5 | 541 | CTAGCAGCCCAGGACGTGAGCTGGGCT | F | 14 | 1643 | ++ |
| LADVGCENA | F | 6 | 542 | CTAGCAGACGTGGGCTGCGAGAACGCT | F | 15 | 1644 | ++ |
| LAATICTEA | F | 7 | 543 | CTAGCAGCCACCATCTGCACCGAGGCT | F | 16 | 1645 | ++ |
| LAEGLSQFA | F | 8 | 544 | CTAGCAGAGGGCCTGAGCCAGTTCGCT | F | 17 | 1646 | + |
| LAKPTGKDA | F | 9 | 545 | CTAGCAAAGCCCACCGGCAAGGACGCT | F | 18 | 1647 | + |
| LARFRGMCA | F | 10 | 546 | CTAGCACGGTTCCGGGGCATGTGCGCT | F | 19 | 1648 | + |

*AAV2 vectors designed to include SEQ ID NO: 1 with the indicated sequence inclusion. The 9-mers were inserted between amino acid residues 587 and 588 of SEQ ID NO: 1. +++ means that the modified AAV2 vectors had a performance that placed them within the top 1/3 of the rescued AAV vectors; ++ means the AAV2 vectors had a performance that placed them within
the middle 1/3 of the rescued AAV vectors; and + means the AAV2 vectors had a performance that placed them within the bottom 1/3 of the rescued AAV vectors.
**SEQ ID NOs used for Sequence Listing.

TABLE 1G
Amino acid sequences that can be inserted into an AAV capsid polypeptide.

| | | | SEQ | | | | SEQ | |
|---|---|---|---|---|---|---|---|---|
| | | | ID | | | | ID | |
| Amino Acid | SEQ ID | | NO: | Nucleic Acid Sequence encoding the Amino Acid | SEQ ID | | NO: | Activity |
| Sequence | NO: | | ** | Sequence | NO: | | ** | Level* |
| LARRKSNEA | G | 2 | 547 | CTAGCACGGCGGAAGAGCAACGAGGCT | G | 78 | 1649 | +++ |
| LAPQNLDEA | G | 3 | 548 | CTAGCACCCCAGAACCTGGACGAGGCT | G | 79 | 1650 | +++ |
| LAMFVWVPA | G | 4 | 549 | CTAGCAATGTTCGTGTGGGTGCCCGCT | G | 80 | 1651 | +++ |
| LACTYTYAA | G | 5 | 550 | CTAGCATGCACCTACACCTACGCCGCT | G | 81 | 1652 | +++ |
| LAKINAQPA | G | 6 | 551 | CTAGCAAAGATCAACGCCCAGCCCGCT | G | 82 | 1653 | +++ |
| LADLSDHHA | G | 7 | 552 | CTAGCAGACCTGAGCGACCACCACGCT | G | 83 | 1654 | +++ |
| LAHEGRQAA | G | 8 | 553 | CTAGCACACGAGGGCCGGCAGGCCGCT | G | 84 | 1655 | +++ |
| LADAHSVTA | G | 9 | 554 | CTAGCAGACGCCCACAGCGTGACCGCT | G | 85 | 1656 | +++ |
| LADLGYPNA | G | 10 | 555 | CTAGCAGACCTGGGCTACCCCAACGCT | G | 86 | 1657 | +++ |
| LAQWFLWRA | G | 11 | 556 | CTAGCACAGTGGTTCCTGTGGCGGGCT | G | 87 | 1658 | +++ |
| LAYAEQSKA | G | 12 | 557 | CTAGCATACGCCGAGCAGAGCAAGGCT | G | 88 | 1659 | +++ |
| LAAKMYNGA | G | 13 | 558 | CTAGCAGCCAAGATGTACAACGGCGCT | G | 89 | 1660 | +++ |
| LAEADKWYA | G | 14 | 559 | CTAGCAGAGGCCGACAAGTGGTACGCT | G | 90 | 1661 | +++ |
| LATVYKSPA | G | 15 | 560 | CTAGCAACCGTGTACAAGAGCCCCGCT | G | 91 | 1662 | +++ |
| LASRTAVAA | G | 16 | 561 | CTAGCAAGCCGGACCGCCGTGGCCGCT | G | 92 | 1663 | +++ |
| LADDMIFVA | G | 17 | 562 | CTAGCAGACGACATGATCTTCGTGGCT | G | 93 | 1664 | +++ |
| LAEFRVGQA | G | 18 | 563 | CTAGCAGAGTTCCGGGTGGGCCAGGCT | G | 94 | 1665 | +++ |
| LAADPTFKA | G | 19 | 564 | CTAGCAGCCGACCCCACCTTCAAGGCT | G | 95 | 1666 | +++ |
| LAVSRHGEA | G | 20 | 565 | CTAGCAGTGAGCCGGCACGGCGAGGCT | G | 96 | 1667 | +++ |
| LAPMRGVYA | G | 21 | 566 | CTAGCACCCATGCGGGGCGTGTACGCT | G | 97 | 1668 | +++ |
| LAFPDKSIA | G | 22 | 567 | CTAGCATTCCCCGACAAGAGCATCGCT | G | 98 | 1669 | +++ |
| LAEFHIPTA | G | 23 | 568 | CTAGCAGAGTTCCACATCCCCACCGCT | G | 99 | 1670 | +++ |
| LALNNDQSA | G | 24 | 569 | CTAGCACTGAACAACGACCAGAGCGCT | G | 100 | 1671 | +++ |
| LAKALGMEA | G | 25 | 570 | CTAGCAAAGGCCCTGGGCATGGAGGCT | G | 101 | 1672 | ++ |
| LAYLPLKYA | G | 26 | 571 | CTAGCATACCTGCCCCTGAAGTACGCT | G | 102 | 1673 | ++ |
| LAHYPSAPA | G | 27 | 572 | CTAGCACACTACCCCAGCGCCCCCGCT | G | 103 | 1674 | ++ |
| LANLKENEA | G | 28 | 573 | CTAGCAAACCTGAAGGAGAACGAGGCT | G | 104 | 1675 | ++ |
| LARSSTLNA | G | 29 | 574 | CTAGCACGGAGCAGCACCCTGAACGCT | G | 105 | 1676 | ++ |
| LAIGERTTA | G | 30 | 575 | CTAGCAATCGGCGAGCGGACCACCGCT | G | 106 | 1677 | ++ |
| LAWIERSMA | G | 31 | 576 | CTAGCATGGATCGAGCGGAGCATGGCT | G | 107 | 1678 | ++ |
| LAYDNTAEA | G | 32 | 577 | CTAGCATACGACAACACCGCCGAGGCT | G | 108 | 1679 | ++ |
| LAERNHGYA | G | 33 | 578 | CTAGCAGAGCGGAACCACGGCTACGCT | G | 109 | 1680 | ++ |
| LADILVGQA | G | 34 | 579 | CTAGCAGACATCCTGGTGGGCCAGGCT | G | 110 | 1681 | ++ |
| LAFNGSTSA | G | 35 | 580 | CTAGCATTCAACGGCAGCACCAGCGCT | G | 111 | 1682 | ++ |
| LADWRTTPA | G | 36 | 581 | CTAGCAGACTGGCGGACCACCCCCGCT | G | 112 | 1683 | ++ |
| LAPSGDRHA | G | 37 | 582 | CTAGCACCCAGCGGCGACCGGCACGCT | G | 113 | 1684 | ++ |
| LAQEAKLTA | G | 38 | 583 | CTAGCACAGGAGGCCAAGCTGACCGCT | G | 114 | 1685 | ++ |
| LAAEHKQTA | G | 39 | 584 | CTAGCAGCCGAGCACAAGCAGACCGCT | G | 115 | 1686 | ++ |
| LAETTLTRA | G | 40 | 585 | CTAGCAGAGACCACCCTGACCCGGGCT | G | 116 | 1687 | ++ |
| LAGESSYLA | G | 41 | 586 | CTAGCAGGCGAGAGCAGCTACCTGGCT | G | 117 | 1688 | ++ |
| LAQVQVEGA | G | 42 | 587 | CTAGCACAGGTGCAGGTGGAGGGCGCT | G | 118 | 1689 | + |
| LAVNRVDMA | G | 43 | 588 | CTAGCAGTGAACCGGGTGGACATGGCT | G | 119 | 1690 | + |
| LAFCTPRYA | G | 44 | 589 | CTAGCATTCTGCACCCCCCGGTACGCT | G | 120 | 1691 | + |
| LADDQAVNA | G | 45 | 590 | CTAGCAGACGACCAGGCCGTGAACGCT | G | 121 | 1692 | + |
| LAREDHRQA | G | 46 | 591 | CTAGCACGGGAGGACCACCGGCAGGCT | G | 122 | 1693 | + |
| LAKVASMNA | G | 47 | 592 | CTAGCAAAGGTGGCCAGCATGAACGCT | G | 123 | 1694 | + |
| LAKDGGKIA | G | 48 | 593 | CTAGCAAAGGACGGCGGCAAGATCGCT | G | 124 | 1695 | + |
| LANRWAIDA | G | 49 | 594 | CTAGCAAACCGGTGGGCCATCGACGCT | G | 125 | 1696 | + |
| LADLTLRAA | G | 50 | 595 | CTAGCAGACCTGACCCTGCGGGCCGCT | G | 126 | 1697 | + |
| LAKEGYRDA | G | 51 | 596 | CTAGCAAAGGAGGGCTACCGGGACGCT | G | 127 | 1698 | + |
| LAGKIEENA | G | 52 | 597 | CTAGCAGGCAAGATCGAGGAGAACGCT | G | 128 | 1699 | + |
| LAPVKHTWA | G | 53 | 598 | CTAGCACCCGTGAAGCACACCTGGGCT | G | 129 | 1700 | + |
| LAQVEVSKA | G | 54 | 599 | CTAGCACAGGTGGAGGTGAGCAAGGCT | G | 130 | 1701 | + |
| LAPLQTQEA | G | 55 | 600 | CTAGCACCCCTGCAGACCCAGGAGGCT | G | 131 | 1702 | 1 |
| LAAHQMASA | G | 56 | 601 | CTAGCAGCCCACCAGATGGCCAGCGCT | G | 132 | 1703 | + |
| LAKKVVDGA | G | 57 | 602 | CTAGCAAAGAAGGTGGTGGACGGCGCT | G | 133 | 1704 | + |
| LAKGPASIA | G | 58 | 603 | CTAGCAAAGGGCCCCGCCAGCATCGCT | G | 134 | 1705 | + |
| LAKGQAQNA | G | 59 | 604 | CTAGCAAAGGGCCAGGCCCAGAACGCT | G | 135 | 1706 | + |
| SGVLFTEG | G | 60 | 605 | AGCGGCGTGCTGTTCACCGAGGGC | G | 136 | 1707 | +++ |
| SGPGTSGT | G | 61 | 606 | AGCGGCCCCGGCACCAGCGGCACC | G | 137 | 1708 | ++ |
| TGEGPTKG | G | 62 | 607 | ACCGGCGAGGGCCCCACCAAGGGC | G | 138 | 1709 | ++ |
| SGSVGYVG | G | 63 | 608 | AGCGGCAGCGTGGGCTACGTGGGC | G | 139 | 1710 | ++ |
| STVPLNMG | G | 64 | 609 | AGCACCGTGCCCCTGAACATGGGC | G | 140 | 1711 | ++ |
| SGREIHFG | G | 65 | 610 | AGCGGCCGGGAGATCCACTTCGGC | G | 141 | 1712 | ++ |
| GTMFNNST | G | 66 | 611 | GGCACCATGTTCAACAACAGCACC | G | 142 | 1713 | + |
| TGDKWPQG | G | 67 | 612 | ACCGGCGACAAGTGGCCCCAGGGC | G | 143 | 1714 | + |
| TSQEKQNS | G | 68 | 613 | ACCAGCCAGGAGAAGCAGAACAGC | G | 144 | 1715 | + |
| TTGMERPT | G | 69 | 614 | ACCACCGGCATGGAGCGGCCCACC | G | 145 | 1716 | + |
| TGDERKPG | G | 70 | 615 | ACCGGCGACGAGCGGAAGCCCGGC | G | 146 | 1717 | + |
| PDVSLL | G | 71 | 616 | CCCGACGTGAGCCTGCTG | G | 147 | 1718 | ++ |
| RTGRNT | G | 72 | 617 | CGGACCGGCCGGAACACC | G | 148 | 1719 | ++ |
| KFTKAA | G | 73 | 618 | AAGTTCACCAAGGCCGCC | G | 149 | 1720 | ++ |
| RLGRLS | G | 74 | 619 | CGGCTGGGCCGGCTGAGC | G | 150 | 1721 | + |
| KAMRTG | G | 75 | 620 | AAGGCCATGCGGACCGGC | G | 151 | 1722 | + |
| HFPVFS | G | 76 | 621 | CACTTCCCCGTGTTCAGC | G | 152 | 1723 | + |
| RLGKVP | G | 77 | 622 | CGGCTGGGCAAGGTGCCC | G | 153 | 1724 | + |

*AAV2 vectors designed to include SEQ ID NO: 1 with the indicated sequence inclusion. The 8-mers and 9-mers were inserted between amino acid residues 587 and 588 of SEQ ID NO: 1, and the 6-mers were used as replacements for amino acid residues 585 to 590 of SEQ ID NO: 1. +++ means that the modified AAV2 vectors had a performance that placed them within the top 1/3 of the rescued AAV vectors; ++ means the AAV2 vectors had a performance that placed them within the middle 1/3 of the rescued AAV vectors; and + means the AAV2 vectors had a performance that placed them within the bottom 1/3 of the rescued AAV vectors.
**SEQ ID NOs used for Sequence Listing.

TABLE 1H
Amino acid sequences that can be inserted into an AAV capsid polypeptide.

| | | | SEQ | | | | SEQ | |
|---|---|---|---|---|---|---|---|---|
| | | | ID | | | | ID | |
| Amino Acid | SEQ ID | | NO: | Nucleic Acid Sequence encoding the Amino | SEQ ID | | NO: | Activity |
| Sequence | NO: | | ** | Acid Sequence | NO: | | ** | Level* |
| LAHGGLREA | H | 2 | 623 | CTAGCACACGGCGGCCTGCGGGAGGCT | H | 259 | 1725 | +++ |
| LATDRTKTA | H | 3 | 624 | CTAGCAACCGACCGGACCAAGACCGCT | H | 260 | 1726 | +++ |
| LARRKSNEA | H | 4 | 625 | CTAGCACGGCGGAAGAGCAACGAGGCT | H | 261 | 1727 | +++ |
| LAVDNIWAA | H | 5 | 626 | CTAGCAGTGGACAACATCTGGGCCGCT | H | 262 | 1728 | +++ |
| LADPLYAVA | H | 6 | 627 | CTAGCAGACCCCCTGTACGCCGTGGCT | H | 263 | 1729 | +++ |
| LAGQAMMQA | H | 7 | 628 | CTAGCAGGCCAGGCCATGATGCAGGCT | H | 264 | 1730 | +++ |
| LAMTKITDA | H | 8 | 629 | CTAGCAATGACCAAGATCACCGACGCT | H | 265 | 1731 | +++ |
| LAFTHGTNA | H | 9 | 630 | CTAGCATTCACCCACGGCACCAACGCT | H | 266 | 1732 | +++ |
| LADPGWKYA | H | 10 | 631 | CTAGCAGACCCCGGCTGGAAGTACGCT | H | 267 | 1733 | +++ |
| LAGGEYETA | H | 11 | 632 | CTAGCAGGCGGCGAGTACGAGACCGCT | H | 268 | 1734 | +++ |
| LAALVDANA | H | 12 | 633 | CTAGCAGCCCTGGTGGACGCCAACGCT | H | 269 | 1735 | +++ |
| LADPTETPA | H | 13 | 634 | CTAGCAGACCCCACCGAGACCCCCGCT | H | 270 | 1736 | +++ |
| LALENIGQA | H | 14 | 635 | CTAGCACTGGAGAACATCGGCCAGGCT | H | 271 | 1737 | +++ |
| LALNDNVGA | H | 15 | 636 | CTAGCACTGAACGACAACGTGGGCGCT | H | 272 | 1738 | +++ |
| LAHRAPDSA | H | 16 | 637 | CTAGCACACCGGGCCCCCGACAGCGCT | H | 273 | 1739 | +++ |
| LAMFVWVPA | H | 17 | 638 | CTAGCAATGTTCGTGTGGGTGCCCGCT | H | 274 | 1740 | +++ |
| LAEGQEDSA | H | 18 | 639 | CTAGCAGAGGGCCAGGAGGACAGCGCT | H | 275 | 1741 | +++ |
| LAPDAKDWA | H | 19 | 640 | CTAGCACCCGACGCCAAGGACTGGGCT | H | 276 | 1742 | +++ |
| LAPHIAKDA | H | 20 | 641 | CTAGCACCCCACATCGCCAAGGACGCT | H | 277 | 1743 | +++ |
| LAAVTEYVA | H | 21 | 642 | CTAGCAGCCGTGACCGAGTACGTGGCT | H | 278 | 1744 | +++ |
| LAFCIKHCA | H | 22 | 643 | CTAGCATTCTGCATCAAGCACTGCGCT | H | 279 | 1745 | +++ |
| LAPPGNPLA | H | 23 | 644 | CTAGCACCCCCCGGCAACCCCCTGGCT | H | 280 | 1746 | +++ |
| LAHWQEEWA | H | 24 | 645 | CTAGCACACTGGCAGGAGGAGTGGGCT | H | 281 | 1747 | +++ |
| LAEFRVGQA | H | 25 | 646 | CTAGCAGAGTTCCGGGTGGGCCAGGCT | H | 282 | 1748 | +++ |
| LAYVIENDA | H | 26 | 647 | CTAGCATACGTGATCGAGAACGACGCT | H | 283 | 1749 | +++ |
| LASTTMNIA | H | 27 | 648 | CTAGCAAGCACCACCATGAACATCGCT | H | 284 | 1750 | +++ |
| LAEFHIPTA | H | 28 | 649 | CTAGCAGAGTTCCACATCCCCACCGCT | H | 285 | 1751 | +++ |
| LASRTAVAA | H | 29 | 650 | CTAGCAAGCCGGACCGCCGTGGCCGCT | H | 286 | 1752 | +++ |
| LAIGSDTSA | H | 30 | 651 | CTAGCAATCGGCAGCGACACCAGCGCT | H | 287 | 1753 | +++ |
| LADDMIFVA | H | 31 | 652 | CTAGCAGACGACATGATCTTCGTGGCT | H | 288 | 1754 | +++ |
| LAKPPPKDA | H | 32 | 653 | CTAGCAAAGCCCCCCCCCAAGGACGCT | H | 289 | 1755 | +++ |
| LAYVALFYA | H | 33 | 654 | CTAGCATACGTGGCCCTGTTCTACGCT | H | 290 | 1756 | +++ |
| LAFQQQRCA | H | 34 | 655 | CTAGCATTCCAGCAGCAGCGGTGCGCT | H | 291 | 1757 | +++ |
| LAAVHLMGA | H | 35 | 656 | CTAGCAGCCGTGCACCTGATGGGCGCT | H | 292 | 1758 | +++ |
| LACPVAEWA | H | 36 | 657 | CTAGCATGCCCCGTGGCCGAGTGGGCT | H | 293 | 1759 | +++ |
| LAVRNEINA | H | 37 | 658 | CTAGCAGTGCGGAACGAGATCAACGCT | H | 294 | 1760 | +++ |
| LADSSKWIA | H | 38 | 659 | CTAGCAGACAGCAGCAAGTGGATCGCT | H | 295 | 1761 | +++ |
| LAVMGNMLA | H | 39 | 660 | CTAGCAGTGATGGGCAACATGCTGGCT | H | 296 | 1762 | +++ |
| LANANTRPA | H | 40 | 661 | CTAGCAAACGCCAACACCCGGCCCGCT | H | 297 | 1763 | +++ |
| LAPNQGTPA | H | 41 | 662 | CTAGCACCCAACCAGGGCACCCCCGCT | H | 298 | 1764 | +++ |
| LAGENHISA | H | 42 | 663 | CTAGCAGGCGAGAACCACATCAGCGCT | H | 299 | 1765 | +++ |
| LALNSGKMA | H | 43 | 664 | CTAGCACTGAACAGCGGCAAGATGGCT | H | 300 | 1766 | +++ |
| LAYDAGGHA | H | 44 | 665 | CTAGCATACGACGCCGGCGGCCACGCT | H | 301 | 1767 | +++ |
| LARAITNEA | H | 45 | 666 | CTAGCACGGGCCATCACCAACGAGGCT | H | 302 | 1768 | +++ |
| LAWNKCPYA | H | 46 | 667 | CTAGCATGGAACAAGTGCCCCTACGCT | H | 303 | 1769 | +++ |
| LANLKENEA | H | 47 | 668 | CTAGCAAACCTGAAGGAGAACGAGGCT | H | 304 | 1770 | +++ |
| LAQVTEMRA | H | 48 | 669 | CTAGCACAGGTGACCGAGATGCGGGCT | H | 305 | 1771 | +++ |
| LARDQLKLA | H | 49 | 670 | CTAGCACGGGACCAGCTGAAGCTGGCT | H | 306 | 1772 | +++ |
| LAVSRHGEA | H | 50 | 671 | CTAGCAGTGAGCCGGCACGGCGAGGCT | H | 307 | 1773 | +++ |
| LAAVGMKMA | H | 51 | 672 | CTAGCAGCCGTGGGCATGAAGATGGCT | H | 308 | 1774 | +++ |
| LAEHKNMHA | H | 52 | 673 | CTAGCAGAGCACAAGAACATGCACGCT | H | 309 | 1775 | +++ |
| LAMNEPVTA | H | 53 | 674 | CTAGCAATGAACGAGCCCGTGACCGCT | H | 310 | 1776 | +++ |
| LAEFVHKGA | H | 54 | 675 | CTAGCAGAGTTCGTGCACAAGGGCGCT | H | 311 | 1777 | +++ |
| LAAYHDSAA | H | 55 | 676 | CTAGCAGCCTACCACGACAGCGCCGCT | H | 312 | 1778 | +++ |
| LAKALGMEA | H | 56 | 677 | CTAGCAAAGGCCCTGGGCATGGAGGCT | H | 313 | 1779 | +++ |
| LAVKGLVNA | H | 57 | 678 | CTAGCAGTGAAGGGCCTGGTGAACGCT | H | 314 | 1780 | +++ |
| LAGIQQHVA | H | 58 | 679 | CTAGCAGGCATCCAGCAGCACGTGGCT | H | 315 | 1781 | +++ |
| LADGGTRPA | H | 59 | 680 | CTAGCAGACGGCGGCACCCGGCCCGCT | H | 316 | 1782 | +++ |
| LAHEPMFNA | H | 60 | 681 | CTAGCACACGAGCCCATGTTCAACGCT | H | 317 | 1783 | +++ |
| LASVSTIQA | H | 61 | 682 | CTAGCAAGCGTGAGCACCATCCAGGCT | H | 318 | 1784 | +++ |
| LASAVMYWA | H | 62 | 683 | CTAGCAAGCGCCGTGATGTACTGGGCT | H | 319 | 1785 | +++ |
| LADKNRLQA | H | 63 | 684 | CTAGCAGACAAGAACCGGCTGCAGGCT | H | 320 | 1786 | +++ |
| LAPMGQNMA | H | 64 | 685 | CTAGCACCCATGGGCCAGAACATGGCT | H | 321 | 1787 | +++ |
| LAAVGVGYA | H | 65 | 686 | CTAGCAGCCGTGGGCGTGGGCTACGCT | H | 322 | 1788 | +++ |
| LAGEFTGKA | H | 66 | 687 | CTAGCAGGCGAGTTCACCGGCAAGGCT | H | 323 | 1789 | +++ |
| LAGEVTKHA | H | 67 | 688 | CTAGCAGGCGAGGTGACCAAGCACGCT | H | 324 | 1790 | +++ |
| LAITQSDIA | H | 68 | 689 | CTAGCAATCACCCAGAGCGACATCGCT | H | 325 | 1791 | +++ |
| LANEAQGKA | H | 69 | 690 | CTAGCAAACGAGGCCCAGGGCAAGGCT | H | 326 | 1792 | +++ |
| LAAKPKDGA | H | 70 | 691 | CTAGCAGCCAAGCCCAAGGACGGCGCT | H | 327 | 1793 | +++ |
| LAAGQAQSA | H | 71 | 692 | CTAGCAGCCGGCCAGGCCCAGAGCGCT | H | 328 | 1794 | +++ |
| LAPMRGVYA | H | 72 | 693 | CTAGCACCCATGCGGGGCGTGTACGCT | H | 329 | 1795 | +++ |
| LASRLNSPA | H | 73 | 694 | CTAGCAAGCCGGCTGAACAGCCCCGCT | H | 330 | 1796 | +++ |
| LACYPPTCA | H | 74 | 695 | CTAGCATGCTACCCCCCCACCTGCGCT | H | 331 | 1797 | +++ |
| LAKVSKGDA | H | 75 | 696 | CTAGCAAAGGTGAGCAAGGGCGACGCT | H | 332 | 1798 | +++ |
| LAGERETVA | H | 76 | 697 | CTAGCAGGCGAGCGGGAGACCGTGGCT | H | 333 | 1799 | ++ |
| LAYITEKSA | H | 77 | 698 | CTAGCATACATCACCGAGAAGAGCGCT | H | 334 | 1800 | ++ |
| LASADHQPA | H | 78 | 699 | CTAGCAAGCGCCGACCACCAGCCCGCT | H | 335 | 1801 | ++ |
| LAHIQEPKA | H | 79 | 700 | CTAGCACACATCCAGGAGCCCAAGGCT | H | 336 | 1802 | ++ |
| LAFNGSTSA | H | 80 | 701 | CTAGCATTCAACGGCAGCACCAGCGCT | H | 337 | 1803 | ++ |
| LAEFDGDGA | H | 81 | 702 | CTAGCAGAGTTCGACGGCGACGGCGCT | H | 338 | 1804 | ++ |
| LAWKCKGTA | H | 82 | 703 | CTAGCATGGAAGTGCAAGGGCACCGCT | H | 339 | 1805 | ++ |
| LAMGHNYVA | H | 83 | 704 | CTAGCAATGGGCCACAACTACGTGGCT | H | 340 | 1806 | ++ |
| LAVTPPWYA | H | 84 | 705 | CTAGCAGTGACCCCCCCCTGGTACGCT | H | 341 | 1807 | ++ |
| LAGHAACFA | H | 85 | 706 | CTAGCAGGCCACGCCGCCTGCTTCGCT | H | 342 | 1808 | ++ |
| LAAANHDNA | H | 86 | 707 | CTAGCAGCCGCCAACCACGACAACGCT | H | 343 | 1809 | ++ |
| LAKDHHVIA | H | 87 | 708 | CTAGCAAAGGACCACCACGTGATCGCT | H | 344 | 1810 | ++ |
| LALHQERQA | H | 88 | 709 | CTAGCACTGCACCAGGAGCGGCAGGCT | H | 345 | 1811 | ++ |
| LADMTRFHA | H | 89 | 710 | CTAGCAGACATGACCCGGTTCCACGCT | H | 346 | 1812 | ++ |
| LATMHNFEA | H | 90 | 711 | CTAGCAACCATGCACAACTTCGAGGCT | H | 347 | 1813 | ++ |
| LAEYHNNDA | H | 91 | 712 | CTAGCAGAGTACCACAACAACGACGCT | H | 348 | 1814 | ++ |
| LAGKTISGA | H | 92 | 713 | CTAGCAGGCAAGACCATCAGCGGCGCT | H | 349 | 1815 | ++ |
| LADFPSEKA | H | 93 | 714 | CTAGCAGACTTCCCCAGCGAGAAGGCT | H | 350 | 1816 | ++ |
| LALKLRTEA | H | 94 | 715 | CTAGCACTGAAGCTGCGGACCGAGGCT | H | 351 | 1817 | ++ |
| LAISQPNPA | H | 95 | 716 | CTAGCAATCAGCCAGCCCAACCCCGCT | H | 352 | 1818 | ++ |
| LAFGFSADA | H | 96 | 717 | CTAGCATTCGGCTTCAGCGCCGACGCT | H | 353 | 1819 | ++ |
| LAKDKGLIA | H | 97 | 718 | CTAGCAAAGGACAAGGGCCTGATCGCT | H | 354 | 1820 | ++ |
| LAIGERTTA | H | 98 | 719 | CTAGCAATCGGCGAGCGGACCACCGCT | H | 355 | 1821 | ++ |
| LAPQKQPVA | H | 99 | 720 | CTAGCACCCCAGAAGCAGCCCGTGGCT | H | 356 | 1822 | ++ |
| LAKFMWIHA | H | 100 | 721 | CTAGCAAAGTTCATGTGGATCCACGCT | H | 357 | 1823 | ++ |
| LAQEQNAAA | H | 101 | 722 | CTAGCACAGGAGCAGAACGCCGCCGCT | H | 358 | 1824 | ++ |
| LAQVQVEGA | H | 102 | 723 | CTAGCACAGGTGCAGGTGGAGGGCGCT | H | 359 | 1825 | ++ |
| LAALNSQTA | H | 103 | 724 | CTAGCAGCCCTGAACAGCCAGACCGCT | H | 360 | 1826 | ++ |
| LAHHKESIA | H | 104 | 725 | CTAGCACACCACAAGGAGAGCATCGCT | H | 361 | 1827 | ++ |
| LAPCYEPPA | H | 105 | 726 | CTAGCACCCTGCTACGAGCCCCCCGCT | H | 362 | 1828 | ++ |
| LANQTTREA | H | 106 | 727 | CTAGCAAACCAGACCACCCGGGAGGCT | H | 363 | 1829 | ++ |
| LADTHTTYA | H | 107 | 728 | CTAGCAGACACCCACACCACCTACGCT | H | 364 | 1830 | ++ |
| LAQKKLLEA | H | 108 | 729 | CTAGCACAGAAGAAGCTGCTGGAGGCT | H | 365 | 1831 | ++ |
| LAVDIMRGA | H | 109 | 730 | CTAGCAGTGGACATCATGCGGGGCGCT | H | 366 | 1832 | ++ |
| LAPIQLAQA | H | 110 | 731 | CTAGCACCCATCCAGCTGGCCCAGGCT | H | 367 | 1833 | ++ |
| LANIVQQDA | H | 111 | 732 | CTAGCAAACATCGTGCAGCAGGACGCT | H | 368 | 1834 | ++ |
| LAKSAGILA | H | 112 | 733 | CTAGCAAAGAGCGCCGGCATCCTGGCT | H | 369 | 1835 | ++ |
| LAHDLHGGA | H | 113 | 734 | CTAGCACACGACCTGCACGGCGGCGCT | H | 370 | 1836 | ++ |
| LAKGFKTEA | H | 114 | 735 | CTAGCAAAGGGCTTCAAGACCGAGGCT | H | 371 | 1837 | ++ |
| LAGSMAKLA | H | 115 | 736 | CTAGCAGGCAGCATGGCCAAGCTGGCT | H | 372 | 1838 | ++ |
| LAGFMEYYA | H | 116 | 737 | CTAGCAGGCTTCATGGAGTACTACGCT | H | 373 | 1839 | ++ |
| LAQGNNTGA | H | 117 | 738 | CTAGCACAGGGCAACAACACCGGCGCT | H | 374 | 1840 | ++ |
| LAVRTGSMA | H | 118 | 739 | CTAGCAGTGCGGACCGGCAGCATGGCT | H | 375 | 1841 | ++ |
| LAYGQQTTA | H | 119 | 740 | CTAGCATACGGCCAGCAGACCACCGCT | H | 376 | 1842 | ++ |
| LADCMMINA | H | 120 | 741 | CTAGCAGACTGCATGATGATCAACGCT | H | 377 | 1843 | ++ |
| LAGVVKTDA | H | 121 | 742 | CTAGCAGGCGTGGTGAAGACCGACGCT | H | 378 | 1844 | ++ |
| LASENLNRA | H | 122 | 743 | CTAGCAAGCGAGAACCTGAACCGGGCT | H | 379 | 1845 | ++ |
| LAQAGDTAA | H | 123 | 744 | CTAGCACAGGCCGGCGACACCGCCGCT | H | 380 | 1846 | ++ |
| LAMHESYNA | H | 124 | 745 | CTAGCAATGCACGAGAGCTACAACGCT | H | 381 | 1847 | ++ |
| LAVNRVDMA | H | 125 | 746 | CTAGCAGTGAACCGGGTGGACATGGCT | H | 382 | 1848 | ++ |
| LAVPKADAA | H | 126 | 747 | CTAGCAGTGCCCAAGGCCGACGCCGCT | H | 383 | 1849 | ++ |
| LAPSGDRHA | H | 127 | 748 | CTAGCACCCAGCGGCGACCGGCACGCT | H | 384 | 1850 | ++ |
| LAFRTMEYA | H | 128 | 749 | CTAGCATTCCGGACCATGGAGTACGCT | H | 385 | 1851 | ++ |
| LATWCLVWA | H | 129 | 750 | CTAGCAACCTGGTGCCTGGTGTGGGCT | H | 386 | 1852 | ++ |
| LAEGMTGIA | H | 130 | 751 | CTAGCAGAGGGCATGACCGGCATCGCT | H | 387 | 1853 | ++ |
| LAKEGYRDA | H | 131 | 752 | CTAGCAAAGGAGGGCTACCGGGACGCT | H | 388 | 1854 | ++ |
| LAAVTKDSA | H | 132 | 753 | CTAGCAGCCGTGACCAAGGACAGCGCT | H | 389 | 1855 | ++ |
| LAPLQTQEA | H | 133 | 754 | CTAGCACCCCTGCAGACCCAGGAGGCT | H | 390 | 1856 | ++ |
| LADHGNKPA | H | 134 | 755 | CTAGCAGACCACGGCAACAAGCCCGCT | H | 391 | 1857 | ++ |
| LADVVSVSA | H | 135 | 756 | CTAGCAGACGTGGTGAGCGTGAGCGCT | H | 392 | 1858 | ++ |
| LAQVEVSKA | H | 136 | 757 | CTAGCACAGGTGGAGGTGAGCAAGGCT | H | 393 | 1859 | ++ |
| LAPSKMGLA | H | 137 | 758 | CTAGCACCCAGCAAGATGGGCCTGGCT | H | 394 | 1860 | ++ |
| LAWIERSMA | H | 138 | 759 | CTAGCATGGATCGAGCGGAGCATGGCT | H | 395 | 1861 | ++ |
| LAYDNTAEA | H | 139 | 760 | CTAGCATACGACAACACCGCCGAGGCT | H | 396 | 1862 | ++ |
| LAHDWGAPA | H | 140 | 761 | CTAGCACACGACTGGGGCGCCCCCGCT | H | 397 | 1863 | ++ |
| LAMDREIKA | H | 141 | 762 | CTAGCAATGGACCGGGAGATCAAGGCT | H | 398 | 1864 | ++ |
| LAVFQETGA | H | 142 | 763 | CTAGCAGTGTTCCAGGAGACCGGCGCT | H | 399 | 1865 | ++ |
| LAKDGGKIA | H | 143 | 764 | CTAGCAAAGGACGGCGGCAAGATCGCT | H | 400 | 1866 | ++ |
| LALNAAATA | H | 144 | 765 | CTAGCACTGAACGCCGCCGCCACCGCT | H | 401 | 1867 | ++ |
| LAIPVEANA | H | 145 | 766 | CTAGCAATCCCCGTGGAGGCCAACGCT | H | 402 | 1868 | ++ |
| LARGTLMTA | H | 146 | 767 | CTAGCACGGGGCACCCTGATGACCGCT | H | 403 | 1869 | ++ |
| LAGDIVRNA | H | 147 | 768 | CTAGCAGGCGACATCGTGCGGAACGCT | H | 404 | 1870 | ++ |
| LAMLACKGA | H | 148 | 769 | CTAGCAATGCTGGCCTGCAAGGGCGCT | H | 405 | 1871 | ++ |
| LADLSDHHA | H | 149 | 770 | CTAGCAGACCTGAGCGACCACCACGCT | H | 406 | 1872 | ++ |
| LANMMAAGA | H | 150 | 771 | CTAGCAAACATGATGGCCGCCGGCGCT | H | 407 | 1873 | ++ |
| LALPEGRFA | H | 151 | 772 | CTAGCACTGCCCGAGGGCCGGTTCGCT | H | 408 | 1874 | ++ |
| LAKGQAQNA | H | 152 | 773 | CTAGCAAAGGGCCAGGCCCAGAACGCT | H | 409 | 1875 | + |
| LAAVKAVVA | H | 153 | 774 | CTAGCAGCCGTGAAGGCCGTGGTGGCT | H | 410 | 1876 | + |
| LANQGFLTA | H | 154 | 775 | CTAGCAAACCAGGGCTTCCTGACCGCT | H | 411 | 1877 | + |
| LAETTLTRA | H | 155 | 776 | CTAGCAGAGACCACCCTGACCCGGGCT | H | 412 | 1878 | + |
| LADGIQKNA | H | 156 | 777 | CTAGCAGACGGCATCCAGAAGAACGCT | H | 413 | 1879 | + |
| LANAMEKHA | H | 157 | 778 | CTAGCAAACGCCATGGAGAAGCACGCT | H | 414 | 1880 | + |
| LADIVGESA | H | 158 | 779 | CTAGCAGACATCGTGGGCGAGAGCGCT | H | 415 | 1881 | + |
| LANVTLQSA | H | 159 | 780 | CTAGCAAACGTGACCCTGCAGAGCGCT | H | 416 | 1882 | + |
| LAFPCIKEA | H | 160 | 781 | CTAGCATTCCCCTGCATCAAGGAGGCT | H | 417 | 1883 | + |
| LADEGREHA | H | 161 | 782 | CTAGCAGACGAGGGCCGGGAGCACGCT | H | 418 | 1884 | + |
| LAREDHRQA | H | 162 | 783 | CTAGCACGGGAGGACCACCGGCAGGCT | H | 419 | 1885 | + |
| LAQNQWTDA | H | 163 | 784 | CTAGCACAGAACCAGTGGACCGACGCT | H | 420 | 1886 | + |
| LAQNQKQIA | H | 164 | 785 | CTAGCACAGAACCAGAAGCAGATCGCT | H | 421 | 1887 | + |
| LATPNVNAA | H | 165 | 786 | CTAGCAACCCCCAACGTGAACGCCGCT | H | 422 | 1888 | + |
| LAPGNDLWA | H | 166 | 787 | CTAGCACCCGGCAACGACCTGTGGGCT | H | 423 | 1889 | + |
| LAMLGGTSA | H | 167 | 788 | CTAGCAATGCTGGGCGGCACCAGCGCT | H | 424 | 1890 | + |
| LAKKVVDGA | H | 168 | 789 | CTAGCAAAGAAGGTGGTGGACGGCGCT | H | 425 | 1891 | + |
| LAGGSKLEA | H | 169 | 790 | CTAGCAGGCGGCAGCAAGCTGGAGGCT | H | 426 | 1892 | + |
| LALYQCDTA | H | 170 | 791 | CTAGCACTGTACCAGTGCGACACCGCT | H | 427 | 1893 | + |
| LAHQGAIIA | H | 171 | 792 | CTAGCACACCAGGGCGCCATCATCGCT | H | 428 | 1894 | + |
| LAGFHAIEA | H | 172 | 793 | CTAGCAGGCTTCCACGCCATCGAGGCT | H | 429 | 1895 | + |
| LANEGTIRA | H | 173 | 794 | CTAGCAAACGAGGGCACCATCCGGGCT | H | 430 | 1896 | + |
| LADPMPTHA | H | 174 | 795 | CTAGCAGACCCCATGCCCACCCACGCT | H | 431 | 1897 | + |
| LAGKIEENA | H | 175 | 796 | CTAGCAGGCAAGATCGAGGAGAACGCT | H | 432 | 1898 | 1 |
| LAPVKHTWA | H | 176 | 797 | CTAGCACCCGTGAAGCACACCTGGGCT | H | 433 | 1899 | + |
| LARSSTLNA | H | 177 | 798 | CTAGCACGGAGCAGCACCCTGAACGCT | H | 434 | 1900 | + |
| LADDQAVNA | H | 178 | 799 | CTAGCAGACGACCAGGCCGTGAACGCT | H | 435 | 1901 | + |
| LATKSTGSA | H | 179 | 800 | CTAGCAACCAAGAGCACCGGCAGCGCT | H | 436 | 1902 | + |
| LAFLRGPEA | H | 180 | 801 | CTAGCATTCCTGCGGGGCCCCGAGGCT | H | 437 | 1903 | + |
| LADENLQAA | H | 181 | 802 | CTAGCAGACGAGAACCTGCAGGCCGCT | H | 438 | 1904 | + |
| LANADFPLA | H | 182 | 803 | CTAGCAAACGCCGACTTCCCCCTGGCT | H | 439 | 1905 | + |
| LAPTTIGGA | H | 183 | 804 | CTAGCACCCACCACCATCGGCGGCGCT | H | 440 | 1906 | + |
| LASACMRAA | H | 184 | 805 | CTAGCAAGCGCCTGCATGCGGGCCGCT | H | 441 | 1907 | + |
| LAKVASMNA | H | 185 | 806 | CTAGCAAAGGTGGCCAGCATGAACGCT | H | 442 | 1908 | + |
| LALNNDQSA | H | 186 | 807 | CTAGCACTGAACAACGACCAGAGCGCT | H | 443 | 1909 | + |
| LAGGKQALA | H | 187 | 808 | CTAGCAGGCGGCAAGCAGGCCCTGGCT | H | 444 | 1910 | + |
| LAVAVDCFA | H | 188 | 809 | CTAGCAGTGGCCGTGGACTGCTTCGCT | H | 445 | 1911 | + |
| LALETTQRA | H | 189 | 810 | CTAGCACTGGAGACCACCCAGCGGGCT | H | 446 | 1912 | + |
| LAPNTPKIA | H | 190 | 811 | CTAGCACCCAACACCCCCAAGATCGCT | H | 447 | 1913 | + |
| LASIGFSAA | H | 191 | 812 | CTAGCAAGCATCGGCTTCAGCGCCGCT | H | 448 | 1914 | + |
| LADVGCENA | H | 192 | 813 | CTAGCAGACGTGGGCTGCGAGAACGCT | H | 449 | 1915 | + |
| LAGSRVNFA | H | 193 | 814 | CTAGCAGGCAGCCGGGTGAACTTCGCT | H | 450 | 1916 | + |
| LADLTLRAA | H | 194 | 815 | CTAGCAGACCTGACCCTGCGGGCCGCT | H | 451 | 1917 | + |
| LAKGQSQGA | H | 195 | 816 | CTAGCAAAGGGCCAGAGCCAGGGCGCT | H | 452 | 1918 | + |
| LAHTPDTFA | H | 196 | 817 | CTAGCACACACCCCCGACACCTTCGCT | H | 453 | 1919 | + |
| LAAHQMASA | H | 197 | 818 | CTAGCAGCCCACCAGATGGCCAGCGCT | H | 454 | 1920 | + |
| LACRSDCVA | H | 198 | 819 | CTAGCATGCCGGAGCGACTGCGTGGCT | H | 455 | 1921 | + |
| LANTWCKGA | H | 199 | 820 | CTAGCAAACACCTGGTGCAAGGGCGCT | H | 456 | 1922 | + |
| LAAEHKQTA | H | 200 | 821 | CTAGCAGCCGAGCACAAGCAGACCGCT | H | 457 | 1923 | + |
| LAAEHIGRA | H | 201 | 822 | CTAGCAGCCGAGCACATCGGCCGGGCT | H | 458 | 1924 | + |
| LAEQVLEKA | H | 202 | 823 | CTAGCAGAGCAGGTGCTGGAGAAGGCT | H | 459 | 1925 | + |
| LAYFHSYAA | H | 203 | 824 | CTAGCATACTTCCACAGCTACGCCGCT | H | 460 | 1926 | + |
| LAEPPDPPA | H | 204 | 825 | CTAGCAGAGCCCCCCGACCCCCCCGCT | H | 461 | 1927 | + |
| LATRADIFA | H | 205 | 826 | CTAGCAACCCGGGCCGACATCTTCGCT | H | 462 | 1928 | + |
| LADTYKPYA | H | 206 | 827 | CTAGCAGACACCTACAAGCCCTACGCT | H | 463 | 1929 | + |
| LANRLSNVA | H | 207 | 828 | CTAGCAAACCGGCTGAGCAACGTGGCT | H | 464 | 1930 | + |
| LAMTNTFLA | H | 208 | 829 | CTAGCAATGACCAACACCTTCCTGGCT | H | 465 | 1931 | + |
| LAGESSYLA | H | 209 | 830 | CTAGCAGGCGAGAGCAGCTACCTGGCT | H | 466 | 1932 | + |
| LANRWAIDA | H | 210 | 831 | CTAGCAAACCGGTGGGCCATCGACGCT | H | 467 | 1933 | + |
| LAETVKYMA | H | 211 | 832 | CTAGCAGAGACCGTGAAGTACATGGCT | H | 468 | 1934 | + |
| LAMKYVFDA | H | 212 | 833 | CTAGCAATGAAGTACGTGTTCGACGCT | H | 469 | 1935 | + |
| LAKRDKPTA | H | 213 | 834 | CTAGCAAAGCGGGACAAGCCCACCGCT | H | 470 | 1936 | + |
| LADWRTTPA | H | 214 | 835 | CTAGCAGACTGGCGGACCACCCCCGCT | H | 471 | 1937 | + |
| LAKGVTTAA | H | 215 | 836 | CTAGCAAAGGGCGTGACCACCGCCGCT | H | 472 | 1938 | + |
| LAFCTPRYA | H | 216 | 837 | CTAGCATTCTGCACCCCCCGGTACGCT | H | 473 | 1939 | + |
| LANLKNFSA | H | 217 | 838 | CTAGCAAACCTGAAGAACTTCAGCGCT | H | 474 | 1940 | + |
| LAHYPSAPA | H | 218 | 839 | CTAGCACACTACCCCAGCGCCCCCGCT | H | 475 | 1941 | + |
| LAQEAKLTA | H | 219 | 840 | CTAGCACAGGAGGCCAAGCTGACCGCT | H | 476 | 1942 | + |
| LAVEPGPPA | H | 220 | 841 | CTAGCAGTGGAGCCCGGCCCCCCCGCT | H | 477 | 1943 | + |
| LAKGPASIA | H | 221 | 842 | CTAGCAAAGGGCCCCGCCAGCATCGCT | H | 478 | 1944 | + |
| LAEGLSQFA | H | 222 | 843 | CTAGCAGAGGGCCTGAGCCAGTTCGCT | H | 479 | 1945 | + |
| LAKPTGKDA | H | 223 | 844 | CTAGCAAAGCCCACCGGCAAGGACGCT | H | 480 | 1946 | + |
| LAKGMKEGA | H | 224 | 845 | CTAGCAAAGGGCATGAAGGAGGGCGCT | H | 481 | 1947 | + |
| TSHVSTSS | H | 225 | 846 | ACCAGCCACGTGAGCACCAGCAGC | H | 482 | 1948 | +++ |
| SGVLFTEG | H | 226 | 847 | AGCGGCGTGCTGTTCACCGAGGGC | H | 483 | 1949 | +++ |
| TSGMGAIG | H | 227 | 848 | ACCAGCGGCATGGGCGCCATCGGC | H | 484 | 1950 | +++ |
| TGDSEQQT | H | 228 | 849 | ACCGGCGACAGCGAGCAGCAGACC | H | 485 | 1951 | +++ |
| SGSVGYVG | H | 229 | 850 | AGCGGCAGCGTGGGCTACGTGGGC | H | 486 | 1952 | +++ |
| TGDKWPQG | H | 230 | 851 | ACCGGCGACAAGTGGCCCCAGGGC | H | 487 | 1953 | +++ |
| SGEMTKPG | H | 231 | 852 | AGCGGCGAGATGACCAAGCCCGGC | H | 488 | 1954 | +++ |
| SGPGTSGT | H | 232 | 853 | AGCGGCCCCGGCACCAGCGGCACC | H | 489 | 1955 | ++ |
| SSENNKGG | H | 233 | 854 | AGCAGCGAGAACAACAAGGGCGGC | H | 490 | 1956 | ++ |
| TTENHKPG | H | 234 | 855 | ACCACCGAGAACCACAAGCCCGGC | H | 491 | 1957 | ++ |
| TSQEKQNS | H | 235 | 856 | ACCAGCCAGGAGAAGCAGAACAGC | H | 492 | 1958 | ++ |
| GTMFNNST | H | 236 | 857 | GGCACCATGTTCAACAACAGCACC | H | 493 | 1959 | ++ |
| SGPKETGG | H | 237 | 858 | AGCGGCCCCAAGGAGACCGGCGGC | H | 494 | 1960 | + |
| SGIDTRLG | H | 238 | 859 | AGCGGCATCGACACCCGGCTGGGC | H | 495 | 1961 | 1 |
| TTGMERPT | H | 239 | 860 | ACCACCGGCATGGAGCGGCCCACC | H | 496 | 1962 | + |
| TGEGPTKG | H | 240 | 861 | ACCGGCGAGGGCCCCACCAAGGGC | H | 497 | 1963 | + |
| TGPGTHNG | H | 241 | 862 | ACCGGCCCCGGCACCCACAACGGC | H | 498 | 1964 | + |
| SGREIHFG | H | 242 | 863 | AGCGGCCGGGAGATCCACTTCGGC | H | 499 | 1965 | + |
| TGDERKPG | H | 243 | 864 | ACCGGCGACGAGCGGAAGCCCGGC | H | 500 | 1966 | + |
| STTKPM | H | 244 | 865 | AGCACCACCAAGCCCATG | H | 501 | 1967 | +++ |
| CKEITR | H | 245 | 866 | TGCAAGGAGATCACCCGG | H | 502 | 1968 | +++ |
| PDVSLL | H | 246 | 867 | CCCGACGTGAGCCTGCTG | H | 503 | 1969 | +++ |
| FNKVLH | H | 247 | 868 | TTCAACAAGGTGCTGCAC | H | 504 | 1970 | +++ |
| RLGRLS | H | 248 | 869 | CGGCTGGGCCGGCTGAGC | H | 505 | 1971 | +++ |
| RTGRNT | H | 249 | 870 | CGGACCGGCCGGAACACC | H | 506 | 1972 | ++ |
| RALKIS | H | 250 | 871 | CGGGCCCTGAAGATCAGC | H | 507 | 1973 | ++ |
| NIKKAA | H | 251 | 872 | AACATCAAGAAGGCCGCC | H | 508 | 1974 | ++ |
| RPGRVS | H | 252 | 873 | CGGCCCGGCCGGGTGAGC | H | 509 | 1975 | ++ |
| RLGKVP | H | 253 | 874 | CGGCTGGGCAAGGTGCCC | H | 510 | 1976 | + |
| NSKKLG | H | 254 | 875 | AACAGCAAGAAGCTGGGC | H | 511 | 1977 | + |
| KAMRTG | H | 255 | 876 | AAGGCCATGCGGACCGGC | H | 512 | 1978 | + |
| KFTKAA | H | 256 | 877 | AAGTTCACCAAGGCCGCC | H | 513 | 1979 | + |
| HSKDGA | H | 257 | 878 | CACAGCAAGGACGGCGCC | H | 514 | 1980 | + |
| HFPVFS | H | 258 | 879 | CACTTCCCCGTGTTCAGC | H | 515 | 1981 | + |

*AAV2 vectors designed to include SEQ ID NO: 1 with the indicated sequence inclusion. The 8-mers and 9-mers were inserted between amino acid residues 587 and 588 of SEQ ID NO: 1, and the 6-mers were used as replacements for amino acid residues 585 to 590 of SEQ ID NO: 1. +++ means that the modified AAV2 vectors had a performance that placed them within the top 1/3 of the rescued AAV vectors; ++ means the AAV2 vectors had a performance that placed them within the middle 1/3 of the rescued AAV vectors; and + means the AAV2 vectors had a performance that placed them within the bottom 1/3 of the rescued AAV vectors.
**SEQ ID NOs used for Sequence Listing.

TABLE 11
Amino acid sequences that can be inserted into an AAV capsid polypeptide.

| | | | SEQ | | | | SEQ | |
|---|---|---|---|---|---|---|---|---|
| | SEQ | | ID | | | | ID | |
| Amino Acid | ID | | NO: | Nucleic Acid Sequence encoding the Amino | SEQ ID | | NO: | Activity |
| Sequence | NO: | | ** | Acid Sequence | NO: | | ** | Level* |
| LAWRIMKHA | I | 2 | 880 | CTAGCATGGCGGATCATGAAGCACGCT | I | 75 | 1982 | +++ |
| LASNMERIA | I | 3 | 881 | CTAGCAAGCAACATGGAGCGGATCGCT | I | 76 | 1983 | +++ |
| LADYRNDKA | I | 4 | 882 | CTAGCAGACTACCGGAACGACAAGGCT | I | 77 | 1984 | +++ |
| LAPNQGTPA | I | 5 | 883 | CTAGCACCCAACCAGGGCACCCCCGCT | I | 78 | 1985 | +++ |
| LAKPPPKDA | I | 6 | 884 | CTAGCAAAGCCCCCCCCCAAGGACGCT | I | 79 | 1986 | +++ |
| LALPEGRFA | I | 7 | 885 | CTAGCACTGCCCGAGGGCCGGTTCGCT | I | 80 | 1987 | +++ |
| LAHPGTTFA | I | 8 | 886 | CTAGCACACCCCGGCACCACCTTCGCT | I | 81 | 1988 | +++ |
| LARGVAPIA | I | 9 | 887 | CTAGCACGGGGCGTGGCCCCCATCGCT | I | 82 | 1989 | +++ |
| LAHRAPDSA | I | 10 | 888 | CTAGCACACCGGGCCCCCGACAGCGCT | I | 83 | 1990 | +++ |
| LAELALIKA | I | 11 | 889 | CTAGCAGAGCTGGCCCTGATCAAGGCT | I | 84 | 1991 | +++ |
| LAVAVDCFA | I | 12 | 890 | CTAGCAGTGGCCGTGGACTGCTTCGCT | I | 85 | 1992 | +++ |
| LACSSTWYA | I | 13 | 891 | CTAGCATGCAGCAGCACCTGGTACGCT | I | 86 | 1993 | +++ |
| LAELDFKWA | I | 14 | 892 | CTAGCAGAGCTGGACTTCAAGTGGGCT | I | 87 | 1994 | +++ |
| LAHEPMFNA | I | 15 | 893 | CTAGCACACGAGCCCATGTTCAACGCT | I | 88 | 1995 | +++ |
| LAKDGMIGA | I | 16 | 894 | CTAGCAAAGGACGGCATGATCGGCGCT | I | 89 | 1996 | +++ |
| LAHEGRQAA | I | 17 | 895 | CTAGCACACGAGGGCCGGCAGGCCGCT | I | 90 | 1997 | +++ |
| LAEYHNNDA | I | 18 | 896 | CTAGCAGAGTACCACAACAACGACGCT | I | 91 | 1998 | +++ |
| LAAEHIGRA | I | 19 | 897 | CTAGCAGCCGAGCACATCGGCCGGGCT | I | 92 | 1999 | +++ |
| LAEPFPVAA | I | 20 | 898 | CTAGCAGAGCCCTTCCCCGTGGCCGCT | I | 93 | 2000 | +++ |
| LAHIQEPKA | I | 21 | 899 | CTAGCACACATCCAGGAGCCCAAGGCT | I | 94 | 2001 | +++ |
| LAFNGSTSA | I | 22 | 900 | CTAGCATTCAACGGCAGCACCAGCGCT | I | 95 | 2002 | +++ |
| LADNCWCCA | I | 23 | 901 | CTAGCAGACAACTGCTGGTGCTGCGCT | I | 96 | 2003 | +++ |
| LACPVAEWA | I | 24 | 902 | CTAGCATGCCCCGTGGCCGAGTGGGCT | I | 97 | 2004 | ++ |
| LAMGHNYVA | I | 25 | 903 | CTAGCAATGGGCCACAACTACGTGGCT | I | 98 | 2005 | ++ |
| LANQGFLTA | I | 26 | 904 | CTAGCAAACCAGGGCTTCCTGACCGCT | I | 99 | 2006 | ++ |
| LAPMRGVYA | I | 27 | 905 | CTAGCACCCATGCGGGGCGTGTACGCT | I | 100 | 2007 | ++ |
| LANEAQGKA | I | 28 | 906 | CTAGCAAACGAGGCCCAGGGCAAGGCT | I | 101 | 2008 | ++ |
| LAQKKLLEA | I | 29 | 907 | CTAGCACAGAAGAAGCTGCTGGAGGCT | I | 102 | 2009 | ++ |
| LAPCYEPPA | I | 30 | 908 | CTAGCACCCTGCTACGAGCCCCCCGCT | I | 103 | 2010 | ++ |
| LAISQPNPA | I | 31 | 909 | CTAGCAATCAGCCAGCCCAACCCCGCT | I | 104 | 2011 | ++ |
| LAQVQVEGA | I | 32 | 910 | CTAGCACAGGTGCAGGTGGAGGGCGCT | I | 105 | 2012 | ++ |
| LAQAGDTAA | I | 33 | 911 | CTAGCACAGGCCGGCGACACCGCCGCT | I | 106 | 2013 | ++ |
| LARSSTLNA | I | 34 | 912 | CTAGCACGGAGCAGCACCCTGAACGCT | I | 107 | 2014 | ++ |
| LAEFRVGQA | I | 35 | 913 | CTAGCAGAGTTCCGGGTGGGCCAGGCT | I | 108 | 2015 | ++ |
| LAGSMAKLA | I | 36 | 914 | CTAGCAGGCAGCATGGCCAAGCTGGCT | I | 109 | 2016 | ++ |
| LAPIQLAQA | I | 37 | 915 | CTAGCACCCATCCAGCTGGCCCAGGCT | I | 110 | 2017 | ++ |
| LAPSGDRHA | I | 38 | 916 | CTAGCACCCAGCGGCGACCGGCACGCT | I | 111 | 2018 | ++ |
| LANRLSNVA | I | 39 | 917 | CTAGCAAACCGGCTGAGCAACGTGGCT | I | 112 | 2019 | ++ |
| LADPMPTHA | I | 40 | 918 | CTAGCAGACCCCATGCCCACCCACGCT | I | 113 | 2020 | ++ |
| LAVEPGPPA | I | 41 | 919 | CTAGCAGTGGAGCCCGGCCCCCCCGCT | I | 114 | 2021 | ++ |
| LAYFHSYAA | I | 42 | 920 | CTAGCATACTTCCACAGCTACGCCGCT | I | 115 | 2022 | ++ |
| LAMTNTFLA | I | 43 | 921 | CTAGCAATGACCAACACCTTCCTGGCT | I | 116 | 2023 | ++ |
| LAFPCIKEA | I | 44 | 922 | CTAGCATTCCCCTGCATCAAGGAGGCT | I | 117 | 2024 | + |
| LAHTPDTFA | I | 45 | 923 | CTAGCACACACCCCCGACACCTTCGCT | I | 118 | 2025 | + |
| LAGEVTKHA | I | 46 | 924 | CTAGCAGGCGAGGTGACCAAGCACGCT | I | 119 | 2026 | + |
| LAGDIVRNA | I | 47 | 925 | CTAGCAGGCGACATCGTGCGGAACGCT | I | 120 | 2027 | + |
| LANRWAIDA | I | 48 | 926 | CTAGCAAACCGGTGGGCCATCGACGCT | I | 121 | 2028 | + |
| LANAMEKHA | I | 49 | 927 | CTAGCAAACGCCATGGAGAAGCACGCT | I | 122 | 2029 | + |
| LADENLQAA | I | 50 | 928 | CTAGCAGACGAGAACCTGCAGGCCGCT | I | 123 | 2030 | + |
| LATRADIFA | I | 51 | 929 | CTAGCAACCCGGGCCGACATCTTCGCT | I | 124 | 2031 | + |
| LAKDGGKIA | I | 52 | 930 | CTAGCAAAGGACGGCGGCAAGATCGCT | I | 125 | 2032 | + |
| LAGKIEENA | I | 53 | 931 | CTAGCAGGCAAGATCGAGGAGAACGCT | I | 126 | 2033 | + |
| LAPVKHTWA | I | 54 | 932 | CTAGCACCCGTGAAGCACACCTGGGCT | I | 127 | 2034 | + |
| LAKVASMNA | I | 55 | 933 | CTAGCAAAGGTGGCCAGCATGAACGCT | I | 128 | 2035 | + |
| LAQVEVSKA | I | 56 | 934 | CTAGCACAGGTGGAGGTGAGCAAGGCT | I | 129 | 2036 | 1 |
| LANLKNFSA | I | 57 | 935 | CTAGCAAACCTGAAGAACTTCAGCGCT | I | 130 | 2037 | + |
| LAKGQAQNA | I | 58 | 936 | CTAGCAAAGGGCCAGGCCCAGAACGCT | I | 131 | 2038 | + |
| LADDQAVNA | I | 59 | 937 | CTAGCAGACGACCAGGCCGTGAACGCT | I | 132 | 2039 | + |
| TSQEKQNS | I | 60 | 938 | ACCAGCCAGGAGAAGCAGAACAGC | I | 133 | 2040 | ++ |
| SGPGTSGT | I | 61 | 939 | AGCGGCCCCGGCACCAGCGGCACC | I | 134 | 2041 | ++ |
| TGIATSYS | I | 62 | 940 | ACCGGCATCGCCACCAGCTACAGC | I | 135 | 2042 | ++ |
| SGREIHFG | I | 63 | 941 | AGCGGCCGGGAGATCCACTTCGGC | I | 136 | 2043 | ++ |
| SGIDTRLG | I | 64 | 942 | AGCGGCATCGACACCCGGCTGGGC | I | 137 | 2044 | + |
| GTMFNNST | I | 65 | 943 | GGCACCATGTTCAACAACAGCACC | I | 138 | 2045 | + |
| TTGMERPT | I | 66 | 944 | ACCACCGGCATGGAGCGGCCCACC | I | 139 | 2046 | + |
| TGDERKPG | I | 67 | 945 | ACCGGCGACGAGCGGAAGCCCGGC | I | 140 | 2047 | + |
| CKEITR | I | 68 | 946 | TGCAAGGAGATCACCCGG | I | 141 | 2048 | +++ |
| PDVSLL | I | 69 | 947 | CCCGACGTGAGCCTGCTG | I | 142 | 2049 | +++ |
| NIKKAA | I | 70 | 948 | AACATCAAGAAGGCCGCC | I | 143 | 2050 | ++ |
| RLGRLS | I | 71 | 949 | CGGCTGGGCCGGCTGAGC | I | 144 | 2051 | + |
| KAMRTG | I | 72 | 950 | AAGGCCATGCGGACCGGC | I | 145 | 2052 | + |
| KFTKAA | I | 73 | 951 | AAGTTCACCAAGGCCGCC | I | 146 | 2053 | + |
| RLGKVP | I | 74 | 952 | CGGCTGGGCAAGGTGCCC | I | 147 | 2054 | + |

*AAV2 vectors designed to include SEQ ID NO: 1 with the indicated sequence inclusion. The 8-mers and 9-mers were inserted between amino acid residues 587 and 588 of SEQ ID NO: 1, and the 6-mers were used as replacements for amino acid residues 585 to 590 of SEQ ID NO: 1. +++ means that the modified AAV2 vectors had a performance that placed them within the top 1/3 of the rescued AAV vectors; ++ means the AAV2 vectors had a performance that placed them within the middle 1/3 of the rescued AAV vectors; and + means the AAV2 vectors had a performance that placed them within the bottom 1/3 of the rescued AAV vectors.
**SEQ ID NOs used for Sequence Listing.

TABLE 1J
Amino acid sequences that can be inserted into an AAV capsid polypeptide.

| | | | SEQ | | | | SEQ | |
|---|---|---|---|---|---|---|---|---|
| | SEQ | | ID | | | | ID | |
| Amino Acid | ID | | NO: | Nucleic Acid Sequence encoding the Amino | SEQ | | NO: | Activity |
| Sequence | NO: | | ** | Acid Sequence | ID NO: | | ** | Level* |
| LAHGGLREA | J | 2 | 953 | CTAGCACACGGCGGCCTGCGGGAGGCT | J | 65 | 2055 | +++ |
| LAFTHGTNA | J | 3 | 954 | CTAGCATTCACCCACGGCACCAACGCT | J | 66 | 2056 | +++ |
| LADPTETPA | J | 4 | 955 | CTAGCAGACCCCACCGAGACCCCCGCT | J | 67 | 2057 | +++ |
| LALNDNVGA | J | 5 | 956 | CTAGCACTGAACGACAACGTGGGCGCT | J | 68 | 2058 | +++ |
| LAFCIKHCA | J | 6 | 957 | CTAGCATTCTGCATCAAGCACTGCGCT | J | 69 | 2059 | +++ |
| LAHWQEEWA | J | 7 | 958 | CTAGCACACTGGCAGGAGGAGTGGGCT | J | 70 | 2060 | +++ |
| LAYVIENDA | J | 8 | 959 | CTAGCATACGTGATCGAGAACGACGCT | J | 71 | 2061 | +++ |
| LASTTMNIA | J | 9 | 960 | CTAGCAAGCACCACCATGAACATCGCT | J | 72 | 2062 | +++ |
| LAYVALFYA | J | 10 | 961 | CTAGCATACGTGGCCCTGTTCTACGCT | J | 73 | 2063 | +++ |
| LAFQQQRCA | J | 11 | 962 | CTAGCATTCCAGCAGCAGCGGTGCGCT | J | 74 | 2064 | +++ |
| LADSSKWIA | J | 12 | 963 | CTAGCAGACAGCAGCAAGTGGATCGCT | J | 75 | 2065 | +++ |
| LAVMGNMLA | J | 13 | 964 | CTAGCAGTGATGGGCAACATGCTGGCT | J | 76 | 2066 | +++ |
| LANANTRPA | J | 14 | 965 | CTAGCAAACGCCAACACCCGGCCCGCT | J | 77 | 2067 | +++ |
| LAGENHISA | J | 15 | 966 | CTAGCAGGCGAGAACCACATCAGCGCT | J | 78 | 2068 | +++ |
| LASVSTIQA | J | 16 | 967 | CTAGCAAGCGTGAGCACCATCCAGGCT | J | 79 | 2069 | +++ |
| LAAYHDSAA | J | 17 | 968 | CTAGCAGCCTACCACGACAGCGCCGCT | J | 80 | 2070 | +++ |
| LAVKGLVNA | J | 18 | 969 | CTAGCAGTGAAGGGCCTGGTGAACGCT | J | 81 | 2071 | +++ |
| LADGGTRPA | J | 19 | 970 | CTAGCAGACGGCGGCACCCGGCCCGCT | J | 82 | 2072 | +++ |
| LACYPPTCA | J | 20 | 971 | CTAGCATGCTACCCCCCCACCTGCGCT | J | 83 | 2073 | +++ |
| LAKVSKGDA | J | 21 | 972 | CTAGCAAAGGTGAGCAAGGGCGACGCT | J | 84 | 2074 | +++ |
| LAWKCKGTA | J | 22 | 973 | CTAGCATGGAAGTGCAAGGGCACCGCT | J | 85 | 2075 | ++ |
| LADMTRFHA | J | 23 | 974 | CTAGCAGACATGACCCGGTTCCACGCT | J | 86 | 2076 | ++ |
| LAGKTISGA | J | 24 | 975 | CTAGCAGGCAAGACCATCAGCGGCGCT | J | 87 | 2077 | ++ |
| LALKLRTEA | J | 25 | 976 | CTAGCACTGAAGCTGCGGACCGAGGCT | J | 88 | 2078 | ++ |
| LAAVTKDSA | J | 26 | 977 | CTAGCAGCCGTGACCAAGGACAGCGCT | J | 89 | 2079 | ++ |
| LAKDKGLIA | J | 27 | 978 | CTAGCAAAGGACAAGGGCCTGATCGCT | J | 90 | 2080 | ++ |
| LAHHKESIA | J | 28 | 979 | CTAGCACACCACAAGGAGAGCATCGCT | J | 91 | 2081 | ++ |
| LAVDIMRGA | J | 29 | 980 | CTAGCAGTGGACATCATGCGGGGCGCT | J | 92 | 2082 | ++ |
| LANIVQQDA | J | 30 | 981 | CTAGCAAACATCGTGCAGCAGGACGCT | J | 93 | 2083 | ++ |
| LAGERETVA | J | 31 | 982 | CTAGCAGGCGAGCGGGAGACCGTGGCT | J | 94 | 2084 | ++ |
| LADVVSVSA | J | 32 | 983 | CTAGCAGACGTGGTGAGCGTGAGCGCT | J | 95 | 2085 | ++ |
| LATPNVNAA | J | 33 | 984 | CTAGCAACCCCCAACGTGAACGCCGCT | J | 96 | 2086 | ++ |
| LALNAAATA | J | 34 | 985 | CTAGCACTGAACGCCGCCGCCACCGCT | J | 97 | 2087 | ++ |
| LADCMMINA | J | 35 | 986 | CTAGCAGACTGCATGATGATCAACGCT | J | 98 | 2088 | ++ |
| LAMLACKGA | J | 36 | 987 | CTAGCAATGCTGGCCTGCAAGGGCGCT | J | 99 | 2089 | ++ |
| LANMMAAGA | J | 37 | 988 | CTAGCAAACATGATGGCCGCCGGCGCT | J | 100 | 2090 | ++ |
| LADKNRLQA | J | 38 | 989 | CTAGCAGACAAGAACCGGCTGCAGGCT | J | 101 | 2091 | ++ |
| LAAVGMKMA | J | 39 | 990 | CTAGCAGCCGTGGGCATGAAGATGGCT | J | 102 | 2092 | ++ |
| LADDMIFVA | J | 40 | 991 | CTAGCAGACGACATGATCTTCGTGGCT | J | 103 | 2093 | ++ |
| LADIVGESA | J | 41 | 992 | CTAGCAGACATCGTGGGCGAGAGCGCT | J | 104 | 2094 | ++ |
| LAGGKQALA | J | 42 | 993 | CTAGCAGGCGGCAAGCAGGCCCTGGCT | J | 105 | 2095 | + |
| LAQNQKQIA | J | 43 | 994 | CTAGCACAGAACCAGAAGCAGATCGCT | J | 106 | 2096 | + |
| LAETTLTRA | J | 44 | 995 | CTAGCAGAGACCACCCTGACCCGGGCT | J | 107 | 2097 | + |
| LAMLGGTSA | J | 45 | 996 | CTAGCAATGCTGGGCGGCACCAGCGCT | J | 108 | 2098 | + |
| LAGFMEYYA | J | 46 | 997 | CTAGCAGGCTTCATGGAGTACTACGCT | J | 109 | 2099 | + |
| LAYGQQTTA | J | 47 | 998 | CTAGCATACGGCCAGCAGACCACCGCT | J | 110 | 2100 | + |
| LALNNDQSA | J | 48 | 999 | CTAGCACTGAACAACGACCAGAGCGCT | J | 111 | 2101 | + |
| LAFLRGPEA | J | 49 | 1000 | CTAGCATTCCTGCGGGGCCCCGAGGCT | J | 112 | 2102 | + |
| LACPVAEWA | J | 50 | 1001 | CTAGCATGCCCCGTGGCCGAGTGGGCT | J | 113 | 2103 | + |
| LALETTQRA | J | 51 | 1002 | CTAGCACTGGAGACCACCCAGCGGGCT | J | 114 | 2104 | + |
| LADTYKPYA | J | 52 | 1003 | CTAGCAGACACCTACAAGCCCTACGCT | J | 115 | 2105 | + |
| LAKRDKPTA | J | 53 | 1004 | CTAGCAAAGCGGGACAAGCCCACCGCT | J | 116 | 2106 | + |
| LAYFHSYAA | J | 54 | 1005 | CTAGCATACTTCCACAGCTACGCCGCT | J | 117 | 2107 | + |
| LAMTNTFLA | J | 55 | 1006 | CTAGCAATGACCAACACCTTCCTGGCT | J | 118 | 2108 | + |
| LAGESSYLA | J | 56 | 1007 | CTAGCAGGCGAGAGCAGCTACCTGGCT | J | 119 | 2109 | + |
| LAAEHIGRA | J | 57 | 1008 | CTAGCAGCCGAGCACATCGGCCGGGCT | J | 120 | 2110 | + |
| LADWRTTPA | J | 58 | 1009 | CTAGCAGACTGGCGGACCACCCCCGCT | J | 121 | 2111 | + |
| LAEGLSQFA | J | 59 | 1010 | CTAGCAGAGGGCCTGAGCCAGTTCGCT | J | 122 | 2112 | + |
| LAKPTGKDA | J | 60 | 1011 | CTAGCAAAGCCCACCGGCAAGGACGCT | J | 123 | 2113 | + |
| TGEGPTKG | J | 61 | 1012 | ACCGGCGAGGGCCCCACCAAGGGC | J | 124 | 2114 | + |
| RALKIS | J | 62 | 1013 | CGGGCCCTGAAGATCAGC | J | 125 | 2115 | ++ |
| NSKKLG | J | 63 | 1014 | AACAGCAAGAAGCTGGGC | J | 126 | 2116 | + |
| HFPVFS | J | 64 | 1015 | CACTTCCCCGTGTTCAGC | J | 127 | 2117 | + |

*AAV2 vectors designed to include SEQ ID NO: 1 with the indicated sequence inclusion. The 8-mers and 9-mers were inserted between amino acid residues 587 and 588 of SEQ ID NO: 1, and the 6-mers were used as replacements for amino acid residues 585 to 590 of SEQ ID NO: 1. +++ means that the modified AAV2 vectors had a performance that placed them within the top 1/3 of the rescued AAV vectors; ++ means the AAV2 vectors had a performance that placed them within the middle 1/3 of the rescued AAV vectors; and + means the AAV2 vectors had a performance that placed them within the bottom 1/3 of the rescued AAV vectors.
**SEQ ID NOs used for Sequence Listing.

TABLE 1K
Amino acid sequences that can be inserted into an AAV capsid polypeptide.

| | | | SEQ | | | | SEQ | |
|---|---|---|---|---|---|---|---|---|
| | SEQ | | ID | | | | ID | |
| Amino Acid | ID | | NO: | Nucleic Acid Sequence encoding the Amino | SEQ ID | | NO: | Activity |
| Sequence | NO: | | ** | Acid Sequence | NO: | | ** | Level* |
| LATDRTKTA | K | 2 | 1016 | CTAGCAACCGACCGGACCAAGACCGCT | K | 64 | 2118 | +++ |
| LAVDNIWAA | K | 3 | 1017 | CTAGCAGTGGACAACATCTGGGCCGCT | K | 65 | 2119 | +++ |
| LAGQAMMQA | K | 4 | 1018 | CTAGCAGGCCAGGCCATGATGCAGGCT | K | 66 | 2120 | +++ |
| LAMTKITDA | K | 5 | 1019 | CTAGCAATGACCAAGATCACCGACGCT | K | 67 | 2121 | +++ |
| LAGGEYETA | K | 6 | 1020 | CTAGCAGGCGGCGAGTACGAGACCGCT | K | 68 | 2122 | +++ |
| LAALVDANA | K | 7 | 1021 | CTAGCAGCCCTGGTGGACGCCAACGCT | K | 69 | 2123 | +++ |
| LALENIGQA | K | 8 | 1022 | CTAGCACTGGAGAACATCGGCCAGGCT | K | 70 | 2124 | +++ |
| LAHRAPDSA | K | 9 | 1023 | CTAGCACACCGGGCCCCCGACAGCGCT | K | 71 | 2125 | +++ |
| LAEGQEDSA | K | 10 | 1024 | CTAGCAGAGGGCCAGGAGGACAGCGCT | K | 72 | 2126 | +++ |
| LAPHIAKDA | K | 11 | 1025 | CTAGCACCCCACATCGCCAAGGACGCT | K | 73 | 2127 | +++ |
| LARDQLKLA | K | 12 | 1026 | CTAGCACGGGACCAGCTGAAGCTGGCT | K | 74 | 2128 | +++ |
| LALNSGKMA | K | 13 | 1027 | CTAGCACTGAACAGCGGCAAGATGGCT | K | 75 | 2129 | +++ |
| LAVSRHGEA | K | 14 | 1028 | CTAGCAGTGAGCCGGCACGGCGAGGCT | K | 76 | 2130 | +++ |
| LAMNEPVTA | K | 15 | 1029 | CTAGCAATGAACGAGCCCGTGACCGCT | K | 77 | 2131 | +++ |
| LAYITEKSA | K | 16 | 1030 | CTAGCATACATCACCGAGAAGAGCGCT | K | 78 | 2132 | ++ |
| LAYDAGGHA | K | 17 | 1031 | CTAGCATACGACGCCGGCGGCCACGCT | K | 79 | 2133 | ++ |
| LALHQERQA | K | 18 | 1032 | CTAGCACTGCACCAGGAGCGGCAGGCT | K | 80 | 2134 | ++ |
| LAAKPKDGA | K | 19 | 1033 | CTAGCAGCCAAGCCCAAGGACGGCGCT | K | 81 | 2135 | ++ |
| LAEYHNNDA | K | 20 | 1034 | CTAGCAGAGTACCACAACAACGACGCT | K | 82 | 2136 | ++ |
| LATWCLVWA | K | 21 | 1035 | CTAGCAACCTGGTGCCTGGTGTGGGCT | K | 83 | 2137 | ++ |
| LAFGFSADA | K | 22 | 1036 | CTAGCATTCGGCTTCAGCGCCGACGCT | K | 84 | 2138 | ++ |
| LAGVVKTDA | K | 23 | 1037 | CTAGCAGGCGTGGTGAAGACCGACGCT | K | 85 | 2139 | ++ |
| LAKFMWIHA | K | 24 | 1038 | CTAGCAAAGTTCATGTGGATCCACGCT | K | 86 | 2140 | ++ |
| LANQGFLTA | K | 25 | 1039 | CTAGCAAACCAGGGCTTCCTGACCGCT | K | 87 | 2141 | ++ |
| LAHDLHGGA | K | 26 | 1040 | CTAGCACACGACCTGCACGGCGGCGCT | K | 88 | 2142 | ++ |
| LASENLNRA | K | 27 | 1041 | CTAGCAAGCGAGAACCTGAACCGGGCT | K | 89 | 2143 | ++ |
| LAFRTMEYA | K | 28 | 1042 | CTAGCATTCCGGACCATGGAGTACGCT | K | 90 | 2144 | ++ |
| LAAANHDNA | K | 29 | 1043 | CTAGCAGCCGCCAACCACGACAACGCT | K | 91 | 2145 | ++ |
| LAPSKMGLA | K | 30 | 1044 | CTAGCACCCAGCAAGATGGGCCTGGCT | K | 92 | 2146 | ++ |
| LANEGTIRA | K | 31 | 1045 | CTAGCAAACGAGGGCACCATCCGGGCT | K | 93 | 2147 | ++ |
| LARGTLMTA | K | 32 | 1046 | CTAGCACGGGGCACCCTGATGACCGCT | K | 94 | 2148 | + |
| LATKSTGSA | K | 33 | 1047 | CTAGCAACCAAGAGCACCGGCAGCGCT | K | 95 | 2149 | + |
| LAALNSQTA | K | 34 | 1048 | CTAGCAGCCCTGAACAGCCAGACCGCT | K | 96 | 2150 | + |
| LANVTLQSA | K | 35 | 1049 | CTAGCAAACGTGACCCTGCAGAGCGCT | K | 97 | 2151 | + |
| LAAGQAQSA | K | 36 | 1050 | CTAGCAGCCGGCCAGGCCCAGAGCGCT | K | 98 | 2152 | + |
| LAHDWGAPA | K | 37 | 1051 | CTAGCACACGACTGGGGCGCCCCCGCT | K | 99 | 2153 | + |
| LAMDREIKA | K | 38 | 1052 | CTAGCAATGGACCGGGAGATCAAGGCT | K | 100 | 2154 | + |
| LANADFPLA | K | 39 | 1053 | CTAGCAAACGCCGACTTCCCCCTGGCT | K | 101 | 2155 | + |
| LAHOGAIIA | K | 40 | 1054 | CTAGCACACCAGGGCGCCATCATCGCT | K | 102 | 2156 | + |
| LAPNTPKIA | K | 41 | 1055 | CTAGCACCCAACACCCCCAAGATCGCT | K | 103 | 2157 | + |
| LAIPVEANA | K | 42 | 1056 | CTAGCAATCCCCGTGGAGGCCAACGCT | K | 104 | 2158 | + |
| LAIGERTTA | K | 43 | 1057 | CTAGCAATCGGCGAGCGGACCACCGCT | K | 105 | 2159 | + |
| LACRSDCVA | K | 44 | 1058 | CTAGCATGCCGGAGCGACTGCGTGGCT | K | 106 | 2160 | + |
| LANRLSNVA | K | 45 | 1059 | CTAGCAAACCGGCTGAGCAACGTGGCT | K | 107 | 2161 | + |
| LAQEQNAAA | K | 46 | 1060 | CTAGCACAGGAGCAGAACGCCGCCGCT | K | 108 | 2162 | + |
| LARSSTLNA | K | 47 | 1061 | CTAGCACGGAGCAGCACCCTGAACGCT | K | 109 | 2163 | + |
| LAMKYVFDA | K | 48 | 1062 | CTAGCAATGAAGTACGTGTTCGACGCT | K | 110 | 2164 | + |
| LAQEAKLTA | K | 49 | 1063 | CTAGCACAGGAGGCCAAGCTGACCGCT | K | 111 | 2165 | + |
| LAREDHRQA | K | 50 | 1064 | CTAGCACGGGAGGACCACCGGCAGGCT | K | 112 | 2166 | + |
| LAHYPSAPA | K | 51 | 1065 | CTAGCACACTACCCCAGCGCCCCCGCT | K | 113 | 2167 | + |
| LAKGMKEGA | K | 52 | 1066 | CTAGCAAAGGGCATGAAGGAGGGCGCT | K | 114 | 2168 | + |
| TSHVSTSS | K | 53 | 1067 | ACCAGCCACGTGAGCACCAGCAGC | K | 115 | 2169 | +++ |
| SGVLFTEG | K | 54 | 1068 | AGCGGCGTGCTGTTCACCGAGGGC | K | 116 | 2170 | +++ |
| TSGMGAIG | K | 55 | 1069 | ACCAGCGGCATGGGCGCCATCGGC | K | 117 | 2171 | +++ |
| TGDSEQQT | K | 56 | 1070 | ACCGGCGACAGCGAGCAGCAGACC | K | 118 | 2172 | +++ |
| SGSVGYVG | K | 57 | 1071 | AGCGGCAGCGTGGGCTACGTGGGC | K | 119 | 2173 | +++ |
| SSENNKGG | K | 58 | 1072 | AGCAGCGAGAACAACAAGGGCGGC | K | 120 | 2174 | ++ |
| SGPGTSGT | K | 59 | 1073 | AGCGGCCCCGGCACCAGCGGCACC | K | 121 | 2175 | ++ |
| TTENHKPG | K | 60 | 1074 | ACCACCGAGAACCACAAGCCCGGC | K | 122 | 2176 | + |
| FNKVLH | K | 61 | 1075 | TTCAACAAGGTGCTGCAC | K | 123 | 2177 | ++ |
| RTGRNT | K | 62 | 1076 | CGGACCGGCCGGAACACC | K | 124 | 2178 | ++ |
| RLGKVP | K | 63 | 1077 | CGGCTGGGCAAGGTGCCC | K | 125 | 2179 | + |

*AAV2 vectors designed to include SEQ ID NO: 1 with the indicated sequence inclusion. The 8-mers and 9-mers were inserted between amino acid residues 587 and 588 of SEQ ID NO: 1, and the 6-mers were used as replacements for amino acid residues 585 to 590 of SEQ ID NO: 1. +++ means that the modified AAV2 vectors had a performance that placed them within the top 1/3 of the rescued AAV vectors; ++ means the AAV2 vectors had a performance that placed them within the middle 1/3 of the rescued AAV vectors; and + means the AAV2 vectors had a performance that placed them within the bottom 1/3 of the rescued AAV vectors.
**SEQ ID NOs used for Sequence Listing.

TABLE 1L
Amino acid sequences that can be inserted into an AAV capsid polypeptide.

| | | | SEQ | | | | SEQ | |
|---|---|---|---|---|---|---|---|---|
| | SEQ | | ID | | SEQ | | ID | |
| Amino Acid | ID | | NO: | Nucleic Acid Sequence encoding the Amino | ID | | NO: | Activity |
| Sequence | NO: | | ** | Acid Sequence | NO: | | ** | Level* |
| LAWIERSMA | L | 2 | 1078 | CTAGCATGGATCGAGCGGAGCATGGCT | L | 28 | 2180 | +++ |
| LAYDNTAEA | L | 3 | 1079 | CTAGCATACGACAACACCGCCGAGGCT | L | 29 | 2181 | +++ |
| LAQVTEMRA | L | 4 | 1080 | CTAGCACAGGTGACCGAGATGCGGGCT | L | 30 | 2182 | ++ |
| LATRADIFA | L | 5 | 1081 | CTAGCAACCCGGGCCGACATCTTCGCT | L | 31 | 2183 | ++ |
| LAKDGGKIA | L | 6 | 1082 | CTAGCAAAGGACGGCGGCAAGATCGCT | L | 32 | 2184 | ++ |
| LAQVEVSKA | L | 7 | 1083 | CTAGCACAGGTGGAGGTGAGCAAGGCT | L | 33 | 2185 | ++ |
| LADTYKPYA | L | 8 | 1084 | CTAGCAGACACCTACAAGCCCTACGCT | L | 34 | 2186 | ++ |
| LAQEAKLTA | L | 9 | 1085 | CTAGCACAGGAGGCCAAGCTGACCGCT | L | 35 | 2187 | ++ |
| LACRSDCVA | L | 10 | 1086 | CTAGCATGCCGGAGCGACTGCGTGGCT | L | 36 | 2188 | ++ |
| LAKDHHVIA | L | 11 | 1087 | CTAGCAAAGGACCACCACGTGATCGCT | L | 37 | 2189 | + |
| LAEPPDPPA | L | 12 | 1088 | CTAGCAGAGCCCCCCGACCCCCCCGCT | L | 38 | 2190 | + |
| LACSSTWYA | L | 13 | 1089 | CTAGCATGCAGCAGCACCTGGTACGCT | L | 39 | 2191 | + |
| LADLTLRAA | L | 14 | 1090 | CTAGCAGACCTGACCCTGCGGGCCGCT | L | 40 | 2192 | + |
| LAKVASMNA | L | 15 | 1091 | CTAGCAAAGGTGGCCAGCATGAACGCT | L | 41 | 2193 | + |
| LAAQDVSWA | L | 16 | 1092 | CTAGCAGCCCAGGACGTGAGCTGGGCT | L | 42 | 2194 | + |
| LADVGCENA | L | 17 | 1093 | CTAGCAGACGTGGGCTGCGAGAACGCT | L | 43 | 2195 | + |
| TGPGTHNG | L | 18 | 1094 | ACCGGCCCCGGCACCCACAACGGC | L | 44 | 2196 | +++ |
| STVPLNMG | L | 19 | 1095 | AGCACCGTGCCCCTGAACATGGGC | L | 45 | 2197 | ++ |
| HSKDGA | L | 20 | 1096 | CACAGCAAGGACGGCGCC | L | 46 | 2198 | +++ |
| RTGRNT | L | 21 | 1097 | CGGACCGGCCGGAACACC | L | 47 | 2199 | +++ |
| NSKKLG | L | 22 | 1098 | AACAGCAAGAAGCTGGGC | L | 48 | 2200 | +++ |
| RPGRVS | L | 23 | 1099 | CGGCCCGGCCGGGTGAGC | L | 49 | 2201 | +++ |
| KFRHTE | L | 24 | 1100 | AAGTTCCGGCACACCGAG | L | 50 | 2202 | ++ |
| KAMRTG | L | 25 | 1101 | AAGGCCATGCGGACCGGC | L | 51 | 2203 | + |
| NIKKAA | L | 26 | 1102 | AACATCAAGAAGGCCGCC | L | 52 | 2204 | + |
| KFTKAA | L | 27 | 1103 | AAGTTCACCAAGGCCGCC | L | 53 | 2205 | + |

*AAV2 vectors designed to include SEQ ID NO: 1 with the indicated sequence inclusion. The 8-mers and 9-mers were inserted between amino acid residues 587 and 588 of SEQ ID NO: 1, and the 6-mers were used as replacements for amino acid residues 585 to 590 of SEQ ID NO: 1. +++ means that the modified AAV2 vectors had a performance that placed them within the top 1/3 of the rescued AAV vectors; ++ means the AAV2 vectors had a performance that placed them within the middle 1/3 of the rescued AAV vectors; and + means the AAV2 vectors had a performance that placed them within the bottom 1/3 of the rescued AAV vectors.
**SEQ ID NOs used for Sequence Listing.

[0168] Many of the amino acid sequences set forth in one or more of Tables 1A-1L start with “LA” and end with “A.” In such cases, that “LA” sequence can be a first linker sequence L1, and that “A” amino acid can be a second linker sequence L2, with the L1 and L2 linkers each independently being optional amino acid linkers having one, two, or three amino acids according to the following Formula A:

-L1-INSERT-L2-,
[0169] wherein L1 and L2 are each independently optional amino acid linkers having one, two, or three amino acids, and wherein INSERT represents the sequence of any of the sequence identifiers of Tables 1A-1L without the starting “LA” and the ending “A.” For example, in some cases, an AAV vector can be designed to have an AAV capsid polypeptide that includes an amino acid sequence set forth in SEQ ID NO:1093, which is LADVGCENA, or can be designed to have an AAV capsid polypeptide that includes an amino acid sequence based on SEQ ID NO:1093 according to Formula A, which is L1-DVGCEN-L2, with L1 and L2 being as defined herein.

[0170] As described herein, an AAV vector can be designed to have an AAV capsid polypeptide that includes an amino acid sequence of Formula A based on any of the amino acid sequences set forth in Tables 1A-1L. For example, an AAV vector can be designed to have an AAV capsid polypeptide of SEQ ID NO:1 (or an alternative sequence that is the amino acid sequence set forth in SEQ ID NO:2206 or that is an amino acid sequence at least 95%, at least 96%, at least 97%, at least 98%, or at least 99% identical to the amino acid sequence set forth in SEQ ID NO: 1) that includes an amino acid sequence of Formula A based on any of the amino acid sequences set forth in Tables 1A-1L located between amino acid positions 587 and 588 of SEQ ID NO:1 (or the appropriate amino acid positions of the alternative sequence). In some cases, L1, L2, or both L1 and L2 can be absent. For example, an AAV capsid polypeptide that includes an amino acid sequence of Formula A based on SEQ ID NO:1093 can include the amino acid sequence of SEQ ID NO:1093 in the absence of the starting “LA” and the ending “A.” In some cases, L1 can be one amino acid X1, two amino acids X2-X1, or three amino acids X3-X2-X1. When X1 is present, it can be an amino acid residue selected from the group consisting of A, V, I, and L. When X2 is present, it can be an amino acid residue selected from the group consisting of A, V, I, and L. When X3 is present, it can be an amino acid residue selected from the group consisting of A, V, I, and L. In some cases, L2 can be one amino acid Z1, two amino acids Z1-Z2, or three amino acids Z1-Z2-Z3. When Z1 is present, it can be an amino acid residue selected from the group consisting of A, V, I, and L. When Z2 is present, it can be an amino acid residue selected from the group consisting of A, V, I, and L. When Z3 is present, it can be an amino acid residue selected from the group consisting of A, V, I, and L. Examples of an L1 linkers include, without limitation, A, V, I, L, AA, AV, AI, AL, VA, VV, VI, VL, IA, IV, II, IL, LA, LV, LI, LL, AAA, AAV, AAI, AAL, AVA, AVV, AVI, AVL, AIA, AIV, AII, AIL, ALA, ALV, ALI, ALL, VAA, VAV, VAI, VAL, VVA, VVV, VVI, VVL, VIA, VIV, VII, VIL, VLA, VLV, VLI, VLL, IAA, IAV, IAI, IAL, IVA, IVV, IVI, IVL, IIA, IIV, III, IIL, ILA, ILV, ILI, ILL, LAA, LAV, LAI, LAL, LVA, LVV, LVI, LVL, LIA, LIV, LII, LIL, LLA, LLV, LLI, and LLL. Examples of an L2 linkers include, without limitation, A, V, I, L, AA, AV, AI, AL, VA, VV, VI, VL, IA, IV, II, IL, LA, LV, LI, LL, AAA, AAV, AAI, AAL, AVA, AVV, AVI, AVL, AIA, AIV, All, AIL, ALA, ALV, ALI, ALL, VAA, VAV, VAI, VAL, VVA, VVV, VVI, VVL, VIA, VIV, VII, VIL, VLA, VLV, VLI, VLL, IAA, IAV, IAI, IAL, IVA, IVV, IVI, IVL, IIA, IIV, III, IIL, ILA, ILV, ILI, ILL, LAA, LAV, LAI, LAL, LVA, LVV, LVI, LVL, LIA, LIV, LII, LIL, LLA, LLV, LLI, and LLL.

[0171] In some cases, an AAV2 capsid polypeptide provided herein can have the sequence set forth in SEQ ID NO:1 (or an alternative sequence that is the amino acid sequence set forth in SEQ ID NO:2206 or that is an amino acid sequence at least 95%, at least 96%, at least 97%, at least 98%, or at least 99% identical to the amino acid sequence set forth in SEQ ID NO: 1) with an amino acid sequence set forth in any one or more of Tables 1A-1L (or a variant thereof) or according to Formula A based on such a set forth sequence inserted between asparagine-587 and arginine-588 (or the appropriate amino acid positions of the alternative sequence) (see, e.g., FIGS. 2-3). In some cases, an AAV2 capsid polypeptide provided herein can have the sequence set forth in SEQ ID NO:1 (or an alternative sequence that is the amino acid sequence set forth in SEQ ID NO:2206 or that is an amino acid sequence at least 95%, at least 96%, at least 97%, at least 98%, or at least 99% identical to the amino acid sequence set forth in SEQ ID NO:1) with an amino acid sequence set forth in any one of SEQ ID NOs:A2-A18, SEQ ID NOs:B2-B298, SEQ ID NOs:C2-C43, SEQ ID NOs:D2-D76, SEQ ID NOs:E2-E75, SEQ ID NOs:F2-F11, SEQ ID NOs:G2-G70, SEQ ID NOs:H2-H243, SEQ ID NOs:I2-I67, SEQ ID NOs:J2-J61, SEQ ID NOs:K2-K60, and SEQ ID NOs:L2-L19 (or a variant thereof) inserted between asparagine-587 and arginine-588 (or the appropriate amino acid positions of the alternative sequence).

[0172] In some cases, when designing an AAV capsid polypeptide (e.g., an AAV2 capsid polypeptide) to include an amino acid sequence set forth in any one or more of Tables 1A-1L (or a variant thereof) or according to Formula A based on such a set forth sequence, that included amino acid sequence can be used to replace one or more naturally-occurring amino acid residues located at any appropriate location along the AAV capsid polypeptide (e.g., the AAV2 capsid polypeptide). For example, an amino acid sequence set forth in any one or more of Tables 1A-1L (or a variant thereof) such as any one of SEQ ID NOs:A2-A19, SEQ ID NOs:B2-B317, SEQ ID NOs:C2-C45, SEQ ID NOs:D2-D78, SEQ ID NOs:E2-E83, SEQ ID NOs:F2-F10, SEQ ID NOs:G2-G77, SEQ ID NOs:H2-H258, SEQ ID NOs:I2-174, SEQ ID NOs:J2-J64, SEQ ID NOs:K2-K63, and SEQ ID NOs:L2-L27 can be used to replace the naturally-occurring amino acid residues at positions 585 to 590 of an AAV capsid polypeptide (e.g., an AAV2 capsid polypeptide) (see, e.g., FIGS. 4-5).

[0173] In some cases, an AAV2 capsid polypeptide provided herein can have the sequence set forth in SEQ ID NO:1 (or an alternative sequence that is the amino acid sequence set forth in SEQ ID NO:2206 or that is an amino acid sequence at least 95%, at least 96%, at least 97%, at least 98%, or at least 99% identical to the amino acid sequence set forth in SEQ ID NO:1) except that the amino acid residues at positions 585 to 590 (or the appropriate amino acid positions of the alternative sequence) are replaced with an amino acid sequence set forth in any one or more of Tables 1A-1L (or a variant thereof) or according to Formula A based on such a set forth sequence. In some cases, an AAV2 capsid polypeptide provided herein can have the sequence set forth in SEQ ID NO:1 (or an alternative sequence that is the amino acid sequence set forth in SEQ ID NO:2206 or that is an amino acid sequence at least 95%, at least 96%, at least 97%, at least 98%, or at least 99% identical to the amino acid sequence set forth in SEQ ID NO:1) with the exception that amino acid residues 585 to 590 (or the appropriate amino acid positions of the alternative sequence) are replaced with the amino acid sequence set forth in any one of SEQ ID NO:A19, SEQ ID NOs:B299-B317, SEQ ID NOs:C44-C45, SEQ ID NOs:D77-D78, SEQ ID NOs:E76-E83, SEQ ID NOs:F2-F10, SEQ ID NOs:G71-G77, SEQ ID NOs:H244-H258, SEQ ID NOs:I68-175, SEQ ID NOs:J62-J64, SEQ ID NOs:K61-K63, and SEQ ID NOs:L20-L27 (or a variant thereof).

[0174] In some cases, an AAV capsid polypeptide (e.g., an AAV2 capsid polypeptide) can be designed to include two or more amino acid sequences set forth in any one or more of Tables 1A-1L (or a variant thereof) or according to Formula A based on such a set forth sequence. For example, an AAV capsid polypeptide (e.g., an AAV2 capsid polypeptide) can be designed to include two, three, or four amino acid sequences set forth in any one or more of Tables 1A-1L (or a variant thereof) or according to Formula A based on such a set forth sequence.

[0175] As described herein, an AAV capsid polypeptide (e.g., an AAV2 capsid polypeptide) can be designed to include an amino acid sequence set forth in any one or more of Tables 1A-1L (or a variant thereof) or according to Formula A based on such a set forth sequence. A variant of an amino acid sequence set forth in any one or more of Tables 1A-1L refers to an amino acid sequence that is identical to that amino acid sequence set forth in any one or more of Tables 1A-1L except that it has one, two, or three amino acid additions, deletions, substitutions, or combinations thereof. For example, a variant of SEQ ID NO:A2 can be SEQ ID NO:A2 except that it has one, two, or three amino acid additions, deletions, substitutions, or combinations thereof. In some cases, a variant provided herein can be the amino acid sequence set forth in any one of SEQ ID NOs:A2-A19, SEQ ID NOs:B2-B317, SEQ ID NOs:C2-C45, SEQ ID NOs:D2-D78, SEQ ID NOs:E2-E83, SEQ ID NOs:F2-F10, SEQ ID NOs:G2-G77, SEQ ID NOs:H2-H258, SEQ ID NOs:I2-174, SEQ ID NOs:J2-J64, SEQ ID NOs:K2-K63, and SEQ ID NOs:L2-L27 except that it contains one, two, or three amino acid additions. In some cases, a variant provided herein can be the amino acid sequence set forth in any one of SEQ ID NOs:A2-A19, SEQ ID NOs:B2-B317, SEQ ID NOs:C2-C45, SEQ ID NOs:D2-D78, SEQ ID NOs:E2-E83, SEQ ID NOs:F2-F10, SEQ ID NOs:G2-G77, SEQ ID NOs:H2-H258, SEQ ID NOs:I2-174, SEQ ID NOs:J2-J64, SEQ ID NOs:K2-K63, and SEQ ID NOs:L2-L27 except that it contains one, two, or three amino acid deletions. In some cases, a variant provided herein can be the amino acid sequence set forth in any one of SEQ ID NOs:A2-A19, SEQ ID NOs:B2-B317, SEQ ID NOs:C2-C45, SEQ ID NOs:D2-D78, SEQ ID NOs:E2-E83, SEQ ID NOs:F2-F10, SEQ ID NOs:G2-G77, SEQ ID NOs:H2-H258, SEQ ID NOs:I2-I74, SEQ ID NOs:J2-J64, SEQ ID NOs:K2-K63, and SEQ ID NOs:L2-L27 except that it contains one, two, or three amino acid substitutions. In some cases, a variant provided herein can be the amino acid sequence set forth in any one of SEQ ID NOs:A2-A19, SEQ ID NOs:B2-B317, SEQ ID NOs:C2-C45, SEQ ID NOs:D2-D78, SEQ ID NOs:E2-E83, SEQ ID NOs:F2-F10, SEQ ID NOs:G2-G77, SEQ ID NOs:H2-H258, SEQ ID NOs:I2-I74, SEQ ID NOs:J2-J64, SEQ ID NOs:K2-K63, and SEQ ID NOs:L2-L27 except that it contains one amino acid addition, deletion, or substitution. In some cases, a variant provided herein can be the amino acid sequence set forth in any one of SEQ ID NOs:A2-A19, SEQ ID NOs:B2-B317, SEQ ID NOs:C2-C45, SEQ ID NOs:D2-D78, SEQ ID NOs:E2-E83, SEQ ID NOs:F2-F10, SEQ ID NOs:G2-G77, SEQ ID NOs:H2-H258, SEQ ID NOs:I2-I74, SEQ ID NOs:J2-J64, SEQ ID NOs:K2-K63, and SEQ ID NOs:L2-L27 except that it contains two amino acid additions, deletions, substitutions, or a combination thereof. In some cases, a variant provided herein can be the amino acid sequence set forth in any one of SEQ ID NOs:A2-A19, SEQ ID NOs:B2-B317, SEQ ID NOs:C2-C45, SEQ ID NOs:D2-D78, SEQ ID NOs:E2-E83, SEQ ID NOs:F2-F10, SEQ ID NOs:G2-G77, SEQ ID NOs:H2-H258, SEQ ID NOs:I2-174, SEQ ID NOs:J2-J64, SEQ ID NOs:K2-K63, and SEQ ID NOs:L2-L27 except that it contains three amino acid additions, deletions, substitutions, or a combination thereof.

[0176] In some cases, an amino acid substitution present in a variant can be a conservative amino acid substitution. For example, conservative amino acid substitutions can be made by substituting one amino acid residue for another amino acid residue having a similar side chain. Families of amino acid residues having similar side chains can include amino acids with basic side chains (e.g., lysine, arginine, histidine), acidic side chains (e.g., aspartic acid, glutamic acid), uncharged polar side chains (e.g., glycine, asparagine, glutamine, serine, threonine, tyrosine, cysteine), non-polar side chains (e.g., alanine, valine, leucine, isoleucine, proline, phenylalanine, methionine, tryptophan), beta-branched side chains (e.g., threonine, valine, isoleucine), and aromatic side chains (e.g., tyrosine, phenylalanine, tryptophan, histidine).

[0177] In some cases, an amino acid substitution present in a variant can be a non-conservative amino acid substitution. Non-conservative amino acid substitutions can be made by substituting one amino acid residue for another amino acid residue having a dissimilar side chain. Examples of non-conservative substitutions include, without limitation, substituting (a) a hydrophilic residue (e.g., serine or threonine) for a hydrophobic residue (e.g., leucine, isoleucine, phenylalanine, valine, or alanine); (b) a cysteine or proline for any other residue; (c) a residue having a basic side chain (e.g., lysine, arginine, or histidine) for a residue having an acidic side chain (e.g., aspartic acid or glutamic acid); and (d) a residue having a bulky side chain (e.g., phenylalanine) for glycine or other residue having a small side chain.

[0178] The percent sequence identity between a particular amino acid sequence and an amino acid sequence referenced by a particular sequence identification number is determined as follows. First, an amino acid sequence is compared to the sequence set forth in a particular sequence identification number using the BLAST 2 Sequences (Bl2seq) program from the stand-alone version of BLASTZ containing BLASTP version 2.0.14. This stand-alone version of BLASTZ can be obtained from Fish & Richardson's web site (e.g., www.fr.com/blast/) or the U.S. government's National Center for Biotechnology Information web site (www.ncbi.nlm.nih.gov). Instructions explaining how to use the B12seq program can be found in the readme file accompanying BLASTZ. Bl2seq performs a comparison between two sequences using either the BLASTN or BLASTP algorithm. BLASTN is used to compare nucleic acid sequences, while BLASTP is used to compare amino acid sequences. To compare two amino acid sequences, the options of Bl2seq are set as follows: -i is set to a file containing the first amino acid sequence to be compared (e.g., C:\seq1.txt); -j is set to a file containing the second amino acid sequence to be compared (e.g., C:\seq2.txt); -p is set to blastp; -o is set to any desired file name (e.g., C:\output.txt); and all other options are left at their default setting. For example, the following command can be used to generate an output file containing a comparison between two amino acid sequences: C:\Bl2seq-i c:\seq1.txt-j c:\seq2.txt-p blastp-o c:\output.txt. If the two compared sequences share homology, then the designated output file will present those regions of homology as aligned sequences. If the two compared sequences do not share homology, then the designated output file will not present aligned sequences. Once aligned, the number of matches is determined by counting the number of positions where an identical amino acid residue is presented in both sequences. A matched position refers to a position in which an identical amino acid residue occurs at the same position in aligned sequences. The percent sequence identity is determined by dividing the number of matches by the length of the sequence set forth in the identified sequence (e.g., SEQ ID NO:1), followed by multiplying the resulting value by 100. For example, an amino acid sequence that has 725 matches when aligned with the sequence set forth in SEQ ID NO:1 is 98.6 percent identical to the sequence set forth in SEQ ID NO:1 (i.e., 725÷735×100=98.6). It is noted that the percent sequence identity value is rounded to the nearest tenth. For example, 78.11, 78.12, 78.13, and 78.14 is rounded down to 78.1, while 78.15, 78.16, 78.17, 78.18, and 78.19 is rounded up to 78.2. It also is noted that the length value will always be an integer.

[0179] Methods for generating an amino acid sequence variant can include site-specific mutagenesis or random mutagenesis (e.g., by PCR) of a nucleic acid encoding an AAV capsid polypeptide. See, for example, Zoller, Curr Opin. Biotechnol. 3: 348-354 (1992).

[0180] The AAV vectors (e.g., AAV2 vectors) described herein can be designed to include one or more exogenous nucleic acid sequences. For example, an AAV vector (e.g., an AAV2 vector) described herein can be designed to include an exogenous nucleic acid sequence that encodes an RNA of interest and/or a polypeptide of interest. An exogenous nucleic acid sequence can be designed to encode any appropriate RNA of interest. Examples of RNAs of interest that can be encoded by an exogenous nucleic acid sequence designed to be included within an AAV vector provided herein include, without limitation, siRNAs, RNA components for gene editing, and microRNAs. In some cases, an RNA of interest that can be encoded by an exogenous nucleic acid sequence included within an AAV vector provided herein can be SIRNA-027 to treat, e.g., sub-foveal CNVM secondary to age-related macular degeneration (see, e.g., NCT00363714), Cand5/Bevasiranib to treat, e.g., diabetic macular edema (see, e.g., NCT00306904), PF-04523655 to treat, e.g., diabetic macular edema (see, e.g., NCT01445899), QPI-1007 to treat, e.g., optic nerve atrophy in NAION (see, e.g., NCT01064505), Aganirsen to treat, e.g., ischemic CRVO to prevent neovascular glaucoma (see, e.g., NCT02947867), QR-421a to treat, e.g., retinitis pigmentosa/Usher syndrome type 2 (see, e.g., NCT03780257), QR-1123 to treat, e.g., autosomal dominant retinitis pigmentosa (see, e.g., NCT04123626), IONIS-FB-LRx to treat, e.g., geographic atrophy secondary to age-related macular degeneration (see, e.g., NCT03815825), or Sepofarsen/QR-110 to treat, e.g., Leber's congenital amaurosis (see, e.g., NCT03913143).

[0181] An exogenous nucleic acid sequence can be designed to encode any appropriate polypeptide of interest. Examples of polypeptides of interest that can be encoded by an exogenous nucleic acid sequence designed to be included within an AAV vector provided herein include, without limitation, therapeutic polypeptides, trophic factor polypeptides, gene editing polypeptides (e.g., a Cas9 polypeptide, a TALEN polypeptide, or a zinc finger polypeptide), enzymes, optogenetic tool polypeptides (e.g., a ChR polypeptide, an NhpR polypeptide, or a ReachR polypeptide), antibodies, antibody domains (e.g., VH domains), cytokines, anti-angiogenic polypeptides, and neuroprotective polypeptides. Examples of polypeptides of interest that can be encoded by an exogenous nucleic acid sequence designed to be included within an AAV vector provided herein include, without limitation, an ABCA4 polypeptide, a CRB1 polypeptide, an NPHP5 polypeptide, an NR2E3 polypeptide, a PDE6A polypeptide, a PDE6B polypeptide, a PDE6C polypeptide, a PRPF31 polypeptide, a RPE65 polypeptide, a RPGR polypeptide, a RS1 polypeptide, a TYR polypeptide, a USH2A polypeptide, a MYO7A polypeptide, an REP1 polypeptide, an OPN1LW polypeptide, an OPN1MW polypeptide, a CNGA3 polypeptide, a CNGB3 polypeptide, a GUCY2D polypeptide, a GACA1A polypeptide, a GNAT2 polypeptide, a PDE6H polypeptide, a PROM1 polypeptide, a PRPH2 polypeptide, a CRX polypeptide, an NPHP5 polypeptide, an EYS polypeptide, an ND4 polypeptide, a CLN1-14 polypeptide (e.g., a CLN3 polypeptide, a CLN5 polypeptide, a CLN6 polypeptide, or a CLN8 polypeptide), an NYX polypeptide, a GRM6 polypeptide, a TRPM1 polypeptide, a GPR179 polypeptide, an LRIT3 polypeptide, a glial cell derived neurotrophic factor (GDNF) polypeptide, a brain-derived neurotrophic factor (BDNF) polypeptide, a fibroblast growth factor (FGF) polypeptide, a truncated rod-derived cone viability factor (RdCVF) polypeptide, a full-length rod-derived cone viability factor (RdCVFL) polypeptide, an X-linked inhibitor of apoptosis (XIAP) polypeptide, a soluble fms-related receptor tyrosine kinase 1 (sFLT) polypeptide, a CYP4V2 polypeptide, a palmitoyl protein thioesterase 1 polypeptide, a tripeptidyl peptidase 1 polypeptide, a DNAJC5 polypeptide, a MFSD8 polypeptide, a cathepsin D polypeptide, a granulin polypeptide, an ATP13A2 polypeptide, a cathepsin F polypeptide, a KCTD7 polypeptide, a “P” gene polypeptide, a TRP1 polypeptide, a MATP (SLC45A2) polypeptide, a SLC24A5 polypeptide, a LRMDA polypeptide, a GPR143 polypeptide, an RPGR-exon 1-ORF15 polypeptide, an USH2b polypeptide, an USHIC polypeptide, a CDH23 polypeptide, a PCDH15 polypeptide, a SANS polypeptide, an USH1H polypeptide, a CIB2 polypeptide, an USH1K polypeptide, an ADGRV1 polypeptide, a WHRN polypeptide, a PDZD7 polypeptide, a CLRN1 polypeptide, a HARS polypeptide, an RP2 polypeptide, a FAM161 polypeptide, a DLK polypeptide, a RHO polypeptide, a CHM polypeptide, a BEST1 polypeptide, a RP1 polypeptide, an OPA1 polypeptide, a CEP290 polypeptide, a RDH12 polypeptide, a CACNAIF polypeptide, a BBS1 polypeptide, a FAM161A polypeptide, a CERKL polypeptide, a PRPF8 polypeptide, a RP1L1 polypeptide, a SNRNP200 polypeptide, an IMPG2 polypeptide, a CDHR1 polypeptide, an IMPDH1 polypeptide, a CNGB1 polypeptide, a MERTK polypeptide, a KCNV2 polypeptide, an AIPL1 polypeptide, a RPGRIP1 polypeptide, a TULP1 polypeptide, a C2ORF71 (aka PCARE) polypeptide, a MAK polypeptide, a TIMP3 polypeptide, a GUCA1A polypeptide, an ALMS1 polypeptide, a BBS10 polypeptide, an IFT140 polypeptide, a CNGA1 polypeptide, a NMNAT1 polypeptide, a COL2A1 polypeptide, an EFEMPI polypeptide, a WFS1 polypeptide, a RDH5 polypeptide, a PRPF3 polypeptide, a LRP5 polypeptide, a TOPORS polypeptide, a DHDDS polypeptide, a LCA5 polypeptide, an IQCB1 polypeptide, a RP9 polypeptide, an ATXN7 polypeptide, a BBS2 polypeptide, a SAG RLBP1 polypeptide, a ND6 (MT-ND6) polypeptide, a CIQTNF5 polypeptide, a VPS13B polypeptide, a KIF11 polypeptide, a MT-TL1 polypeptide, a KLHL7 polypeptide, an ACO2 polypeptide, a C21orf2 (aka CFAP410) polypeptide, an AHI1 polypeptide, a KIZ polypeptide, a SPATA7 polypeptide, a TTLL5 polypeptide, an HGSNAT polypeptide, a NRL polypeptide, an OAT polypeptide, a FLVCR1 polypeptide, an ABCC6 polypeptide, a LRAT polypeptide, a CEP78 polypeptide, a CDH3 polypeptide, a FZD4 polypeptide, a BBS12 polypeptide, an HK1 polypeptide, a PRDM13 polypeptide, an ADAM9 polypeptide, a BBS7 polypeptide, a CABP4 polypeptide, an ABHD12 polypeptide, a COL18A1 polypeptide, a MFRP polypeptide, a RIMS1 polypeptide, a ROM1 polypeptide, a BBS4 polypeptide, an IMPG1 polypeptide, an INPP5E polypeptide, a VCAN polypeptide, a POC1B polypeptide, a RAX2 polypeptide, a TSPAN12 polypeptide, a CACNA2D4 polypeptide, a JAG1 polypeptide, a MKKS polypeptide, a NPHP4 polypeptide, a BBS9 polypeptide, a COL11A1 polypeptide, an ELOVL4 polypeptide, a NDP polypeptide, a NPHP1 polypeptide, a RGR polypeptide, a BBS5 polypeptide, a WDR19 polypeptide, a C8ORF37 polypeptide, a CTNNA1 polypeptide, a LAMP2 polypeptide, a PEX1 polypeptide, a PHYH polypeptide, an ATF6 polypeptide, a PRPS1 polypeptide, a SEMA4A polypeptide, an ARL6 polypeptide, a CNNM4 polypeptide, an OTX2 polypeptide, a PRPF6 polypeptide, a RBP3 polypeptide, a PNPLA6 polypeptide, a SLC24A1 polypeptide, an USHIG polypeptide, a PITPNM3 polypeptide, a TTC8 polypeptide, an ARSG polypeptide, a CWC27 polypeptide, a DRAM2 polypeptide, a PRCD polypeptide, a REEP6 polypeptide, a SSBP1 polypeptide, a LAMAI polypeptide, a RAB28 polypeptide, a ZNF408 polypeptide, a GNAT1 polypeptide, an IDH3A polypeptide, a PDE6G polypeptide, a PEX6 polypeptide, a TUB polypeptide, a CEP250 polypeptide, a FSCN2 polypeptide, a GRK1 polypeptide, a RBP4 polypeptide, a RD3 polypeptide, an AGBL5 polypeptide, a CAPN5 polypeptide, an IFT172 polypeptide, a KCNJ13 polypeptide, a PAX2 polypeptide, a CC2D2A polypeptide, a HMCN1 polypeptide, a MT-ATP6 polypeptide, a RCBTB1 polypeptide, an ARL2BP polypeptide, a CA4 polypeptide, a DFNB31 polypeptide, a GNB3 polypeptide, a MMACHC polypeptide, a PRPF4 polypeptide, a RGS9 polypeptide, an ARHGEF18 polypeptide, a KIAA1549 polypeptide, a MKS1 polypeptide, a MTTP (not MT-TP) polypeptide, a PLK4 polypeptide, a RPGRIP1L polypeptide, a SDCCAG8 polypeptide, a SRD5A3 polypeptide, a TUBB4B polypeptide, an ADAMTS18 polypeptide, an ARL3 polypeptide, a COL11A2 polypeptide, a MVK polypeptide, a NBAS polypeptide, an OFD1 polypeptide, a P3H2 polypeptide, a RGS9BP polypeptide, a CSPP1 polypeptide, an ITM2B polypeptide, a PANK2 polypeptide, a PEX7 polypeptide, a POMGNT1 polypeptide, a SLC4A7 polypeptide, a TMEM231 polypeptide, a TRNT1 polypeptide, a TUBGCP6 polypeptide, a ZNF513 polypeptide, an AFG3L2 polypeptide, an ARL13B polypeptide, a C5ORF42 (aka CPLANE1) polypeptide, a COL9AI polypeptide, a CTSD polypeptide, a DTHD1 polypeptide, a DYNC2H1 polypeptide, an IFT81 polypeptide, a KIAA0586 polypeptide, a MFN2 polypeptide, a NPHP3 polypeptide, a PCYT1A polypeptide, a PEX12 polypeptide, a PLA2G5 polypeptide, a POC5 polypeptide, a SCAPER polypeptide, a SLC25A46 polypeptide, a TMEM237 polypeptide, a TRAF3IP1 polypeptide, a TTC21B polypeptide, a TUBGCP4 polypeptide, an ADIPOR1 polypeptide, a CEP164 polypeptide, a CLCC1 polypeptide, a COL9A2 polypeptide, a CTNNB1 polypeptide, a DHX38 polypeptide, a GNPTG polypeptide, a GRN polypeptide, a GUCAIB polypeptide, an IFT27 polypeptide, an IFT74 polypeptide, a KIAA0556 polypeptide, a LRP2 polypeptide, a MAPKAPK3 polypeptide, a MIR204 polypeptide, a MT-ND3 polypeptide, a MT-RNR1 polypeptide, a MT-TS2 polypeptide, a ND5 (MT-ND5) polypeptide, a NEK2 polypeptide, an OPNlSW polypeptide, a PEX13 polypeptide, a PEX2 polypeptide, a RHBDD2 polypeptide, a SAMD11 polypeptide, a SCLT1 polypeptide, a SLC7A14 polypeptide, a TCTN1 polypeptide, a TCTN2 polypeptide, a TLCD3B polypeptide, a TREX1 polypeptide, a TTPA polypeptide, an UNC119 polypeptide, a WDPCP polypeptide, an ACBD5 polypeptide, an AHR polypeptide, an ARMC9 polypeptide, an ASRGL1 polypeptide, an ATOH7 polypeptide, a B9D1 polypeptide, a B9D2 polypeptide, a BBIP1 polypeptide, a C12ORF65 polypeptide, a C2CD3 polypeptide, a C5AR2 polypeptide, a CCDCl88 polypeptide, a CCT2 polypeptide, a CEP104 polypeptide, a CEP120 polypeptide, a CEP19 polypeptide, a CEP41 polypeptide, a CISD2 polypeptide, a CLUAP1 polypeptide, a COL9A3 polypeptide, a CRB2 polypeptide, a CTC1 polypeptide, a DACT2 polypeptide, a DDR1 polypeptide, an ENSA polypeptide, an ESPN polypeptide, an EXOSC2 polypeptide, a FBN3 polypeptide, a GDF6 polypeptide, a GPR125 polypeptide, a HKDC1 polypeptide, a HMX1 polypeptide, an IDH3B polypeptide, an IFT43 polypeptide, an IFT80 polypeptide, an INVS polypeptide, a KIAA0753 polypeptide, a KIF3B polypeptide, a KIF7 polypeptide, a LRRTM4 polypeptide, a LZTFL1 polypeptide, a MT-ATP8 polypeptide, a MT-CO1 polypeptide, a MT-C02 polypeptide, a MT-C03 polypeptide, a MT-CYB polypeptide, a MT-ND2 polypeptide, a MT-ND4L polypeptide, a MT-RNR2 polypeptide, a MT-TA polypeptide, a MT-TC polypeptide, a MT-TD polypeptide, a MT-TE polypeptide, a MT-TF polypeptide, a MT-TG polypeptide, a MT-TH polypeptide, a MT-TI polypeptide, a MT-TK polypeptide, a MT-TL2 polypeptide, a MT-TM polypeptide, a MT-TN polypeptide, a MT-TP (Not MTTP) polypeptide, a MT-TQ polypeptide, a MT-TR polypeptide, a MT-TS1 polypeptide, a MT-TT polypeptide, a MT-TV polypeptide, a MT-TW polypeptide, a MT-TY polypeptide, a NEURODI polypeptide, a PDE6D polypeptide, a PEX10 polypeptide, a PEX11B polypeptide, a PEX14 polypeptide, a PEX16 polypeptide, a PEX19 polypeptide, a PEX26 polypeptide, a PEX3 polypeptide, a PEX5 polypeptide, a PGK1 polypeptide, a PISD polypeptide, a PPP2R3C polypeptide, a PROS1 polypeptide, a PSEN1 polypeptide, a RDH11 polypeptide, a RRM2B polypeptide, a SMARCA4 polypeptide, a SPP2 polypeptide, a TCTN3 polypeptide, a TEAD1 polypeptide, a TMEM10⁷ polypeptide, a TMEM138 polypeptide, a TMEM216 polypeptide, a TMEM67 polypeptide, a TPP1 polypeptide, a TRIM32 polypeptide, a USP45 polypeptide, and a ZNF423 polypeptide. In some cases, a polypeptide of interest that can be encoded by an exogenous nucleic acid sequence designed to be included within an AAV vector provided herein can be a MYO7A polypeptide, an USH1C polypeptide, a PCDH15 polypeptide, an USH2A polypeptide, or CLRN1 polypeptide to treat, e.g., Usher Syndrome.

[0182] In some cases, one or more AAV vectors provided herein can be designed to carry out gene editing within one or more cells (e.g., retinal cells). Such gene editing can result in a genomic modification of one or more cells. Examples of such genomic modifications include, without limitation, a targeted insertion of a nucleic acid encoding an RNA and/or polypeptide of interest into one or more cells, a targeted modification (e.g., targeted inactivation or knock-out) of a genomic sequence of one or more cells, and a targeted replacement of nucleic acid (e.g., nucleic acid encoding an RNA, a regulatory nucleic acid sequence, and/or nucleic acid encoding a polypeptide of interest) within one or more cells.

[0183] Any appropriate gene editing components can be engineered into one or more AAV vectors provided herein such that those one or more AAV vectors can be used to deliver the gene editing components to target cells (e.g., one or more retinal cells) within a mammal (e.g., a human or a non-human primate) in a manner effective to edit the genome of those cells.

[0184] Typically, the gene editing components include, without limitation, a component that is capable of cleaving genomic nucleic acid at a desired location and an optional donor nucleic acid designed to be inserted into that desired location once it is cleaved. Any appropriate rare-cutting endonuclease can be used to cleave genomic nucleic acid at a desired location. Examples of such rare-cutting endonucleases include, without limitation, meganucleases, transcription activator-like effector (TALE) nucleases (TALENs™; Cellectis, Paris, France), zinc-finger-nucleases (ZFNs), and endonucleases of a clustered regularly interspaced short palindromic repeats (CRISPR)/Cas system (e.g., endonucleases of a CRISPR/Cas 9 system). See, e.g., Baker, Nature Methods, 9:23-26 (2012); International PCT Patent Application Publication No. WO 2004/067736; International PCT Patent Application Publication No. WO 2011/072246; U.S. Pat. No. 8,586,363; Porteus and Carroll, Nature Biotechnol., 23:967-973 (2005); Jinek et al., Science, 337:816-821 (2012); Mali et al., Science, 339:823-826 (2013); Li et al., Nature Biotechnology, 31(8):688-691 (2013); and Makarova et al., Nat. Rev. Microbiol., 9(6):467-477 (2011)).

[0185] In some cases, to facilitate gene replacement, two sequences in genomic nucleic acid of a cell (e.g., a retinal cell)—one on either side of a sequence to be removed—can be targeted for endonuclease cleavage. For example, a first target sequence adjacent to the 5′ end of a sequence to be removed and a second target sequence adjacent to the 3′ end of the sequence to be removed can be targeted by guide RNAs to enable Cas9 cleavage or can be targeted by TALENs designed to specifically recognize those targets. Delivery using one or more AAV vectors provided herein of (a) endonucleases targeted to the genomic DNA and (b) a donor nucleic acid construct can allow cleavage at both genomic targets, removal of the sequence between the genomic targets, and insertion of the donor sequence into the location of the deletion.

[0186] An AAV vector (e.g., an AAV2 vector) provided herein can include any appropriate promoter and/or other regulatory sequence (e.g., enhancers, transcription initiation sites, translation initiation sites, and termination signals) operably linked an exogenous nucleic acid sequence designed to be expressed. In some cases, a promoter used to drive expression can be a constitutive promotor, a regulatable promotor, a tissue-specific promoter, or a viral promotor. Examples of constitutive promotors that can be used as described herein include, without limitation, SV40 promotors, CMV promotors, and E1ALPHA promotors. Examples of regulatable promoters that can be used as described herein include, without limitation, inducible promotors and repressible promotors. Examples of tissue-specific promotors that can be used as described herein include, without limitation, rhodopsin promotors, cone arrestin promotors, and synapsin promotors. Examples of viral promotors that can be used as described herein include, without limitation, adenoviral promotors, vaccinia virus promotors, CMV promotors (e.g., immediate early CMV promotors), and AAV promoters.

[0187] In some cases, an AAV vector (e.g., an AAV2 vector) provided herein can include a total number of nucleotides up to about 5 kb. In some cases, an AAV vector (e.g., an AAV2 vector) provided herein can include a total number of nucleotides that is from about 1 kb to about 5 kb, from about 1 kb to about 4 kb, from about 1 kb to about 3 kb, from about 2 kb to about 5 kb, from about 2 kb to about 4 kb, from about 2 kb to about 3 kb, from about 3 kb to about 5 kb, from about 3 kb to about 4 kb, or from about 4 kb to about 5 kb.

[0188] An AAV vector (e.g., an AAV2 vector) described herein containing an AAV capsid polypeptide (e.g., an AAV2 capsid polypeptide) that includes an amino acid sequence set forth in Table 1A (or a variant thereof) or according to Formula A based on such a set forth sequence can have the ability to infect foveal cones in vivo and deliver exogenous nucleic acid sequence to the infected foveal cones such that the infected foveal cones express the exogenous nucleic acid sequence. In some cases, an AAV vector (e.g., an AAV2 vector) provided herein can have the ability to infect and drive RNA expression of an exogenous nucleic acid sequence in more cone cells present in the fovea of a mammal (e.g., a human or a non-human primate) when compared to wild-type AAV2. In some cases, an AAV vector (e.g., an AAV2 vector) provided herein can have the ability to drive a level of RNA expression of an exogenous nucleic acid sequence in foveal cones of a mammal (e.g., a human or a non-human primate) that is greater than the level of RNA expression of an exogenous nucleic acid sequence driven by a control AAV vector (e.g., wild-type AAV2) having an AAV capsid polypeptide that consists of the amino acid sequence set forth in SEQ ID NO:1 in foveal cones of a control mammal (e.g., a control human or a control non-human primate).

[0189] An AAV vector (e.g., an AAV2 vector) described herein containing an AAV capsid polypeptide (e.g., an AAV2 capsid polypeptide) that includes an amino acid sequence set forth in Table 1B (or a variant thereof) or according to Formula A based on such a set forth sequence can have the ability to infect retinal cells (e.g., retinal ganglion cells, photoreceptor cells, and bipolar cells) in vivo and deliver exogenous nucleic acid sequence to the infected retinal cells such that the infected retinal cells express the exogenous nucleic acid sequence (e.g., at high levels). In some cases, an AAV vector (e.g., an AAV2 vector) provided herein can have the ability to infect and drive RNA expression of an exogenous nucleic acid sequence in at least 2 percent (e.g., (e.g., at least 2.5 percent, at least 5 percent, at least 7.5 percent, at least 10 percent, or at least 25 percent) of retinal cells of an eye of a mammal (e.g., a human or a non-human primate). In some cases, an AAV vector (e.g., an AAV2 vector) provided herein can have the ability to drive a level of RNA expression of an exogenous nucleic acid sequence in retinal cells (e.g., retinal ganglion cells, photoreceptor cells, and bipolar cells) of a mammal (e.g., a human or a non-human primate) that is greater than (e.g., at least 2 percent greater than, at least 2.5 percent greater than, at least 5 percent greater than, at least 7.5 percent greater than, at least 10 percent greater than, at least 25 percent greater than, at least 50 percent greater than, at least 75 percent greater than, or at least 100 percent greater than) the level of mRNA expression of an exogenous nucleic acid driven by a comparable AAV vector having an AAV capsid polypeptide that consists of the amino acid sequence of SEQ ID NO:1 (e.g., a wild-type AAV2 vector) in retinal cells of a control mammal (e.g., a control human or a control non-human primate).

[0190] An AAV vector (e.g., an AAV2 vector) described herein containing an AAV capsid polypeptide (e.g., an AAV2 capsid polypeptide) that includes an amino acid sequence set forth in Table 1C (or a variant thereof) or according to Formula A based on such a set forth sequence can have the ability to infect retinal cells (e.g., retinal ganglion cells, photoreceptor cells, and bipolar cells) across retinal regions (e.g., across two, three, or four retinal regions) in vivo and deliver exogenous nucleic acid sequence to the infected retinal cells such that the infected retinal cells express the exogenous nucleic acid sequence (e.g., a high levels). In some cases, an AAV vector (e.g., an AAV2 vector) provided herein can have the ability to infect and drive RNA expression of an exogenous nucleic acid sequence in at least about 2 percent (e.g., at least about 2.5 percent, at least about 5 percent, at least about 7.5 percent, at least about 10 percent, or at least about 25 percent) of the retinal cells in the fovea region, at least about 2 percent (e.g., at least about 2.5 percent, at least about 5 percent, at least about 7.5 percent, at least about 10 percent, or at least about 25 percent) of the retinal cells in the parafovea region, at least about 2 percent (e.g., at least about 2.5 percent, at least about 5 percent, at least about 7.5 percent, at least about 10 percent, or at least about 25 percent) of the retinal cells in the vascular arcade region, and/or at least about 2 percent (e.g., at least about 2.5 percent, at least about 5 percent, at least about 7.5 percent, at least about 10 percent, or at least about 25 percent) of the retinal cells in the periphery region of an eye of a mammal (e.g., a human or a non-human primate). In some cases, an AAV vector (e.g., an AAV2 vector) provided herein can have the ability to drive a level of RNA expression of an exogenous nucleic acid sequence in retinal cells (e.g., retinal ganglion cells, photoreceptor cells, and bipolar cells) in at least two, three, or four different regions of an eye of a mammal (e.g., a human or a non-human primate) that is greater than the level of RNA expression of an exogenous nucleic acid sequence driven by a control AAV vector having an AAV capsid polypeptide that consists of the amino acid sequence set forth in SEQ ID NO:1 (e.g., a wild-type AAV2 vector) in retinal cells of those regions in a control mammal (e.g., a control human or a control non-human primate).

[0191] An AAV vector (e.g., an AAV2 vector) described herein containing an AAV capsid polypeptide (e.g., an AAV2 capsid polypeptide) that includes an amino acid sequence set forth in Table 1D (or a variant thereof) or according to Formula A based on such a set forth sequence can have the ability to infect retinal cells of the parafovea region of the eye in vivo and deliver exogenous nucleic acid sequence to the infected retinal cells such that the infected retinal cells express the exogenous nucleic acid sequence. In some cases, an AAV vector (e.g., an AAV2 vector) provided herein can have the ability to infect and drive RNA expression of an exogenous nucleic acid sequence in at least 2 percent (e.g., at least about 2.5 percent, at least about 5 percent, at least about 7.5 percent, at least about 10 percent, or at least about 25 percent) of retinal cells present in the parafovea region of the eye of a mammal (e.g., a human or a non-human primate). In some cases, an AAV vector (e.g., an AAV2 vector) provided herein can have the ability to drive a level of RNA expression of an exogenous nucleic acid sequence in retinal cells of the parafovea region of the eye of a mammal (e.g., a human or a non-human primate) that is greater than (e.g., at least 10 percent greater than, at least 25 percent greater than, at least 50 percent greater than, at least 75 percent greater than, or at least 100 percent greater than) the level of RNA expression of an exogenous nucleic acid sequence driven by a control AAV vector having an AAV capsid polypeptide that consists of the amino acid sequence set forth in SEQ ID NO:1 (e.g., a wild type AAV2 vector) in retinal cells of the parafovea region of the eye of a control mammal (e.g., a control human or a control non-human primate).

[0192] An AAV vector (e.g., an AAV2 vector) described herein containing an AAV capsid polypeptide (e.g., an AAV2 capsid polypeptide) that includes an amino acid sequence set forth in Table 1E (or a variant thereof) or according to Formula A based on such a set forth sequence can have the ability to infect two or more (e.g., two or more, three or more, four or more, five or more, six or more, or seven or more) different retinal cell types within an eye in vivo and deliver exogenous nucleic acid to the infected retinal cells such that the infected retinal cells express the exogenous nucleic acid. For example, an AAV vector (e.g., an AAV2 vector) described herein containing an AAV capsid polypeptide (e.g., an AAV2 capsid polypeptide) that includes an amino acid sequence set forth in Table 1E (or a variant thereof) or according to Formula A based on such a set forth sequence can have the ability to infect two, three, four, five, six, or seven of the following retinal cell types: retinal ganglion cells, amacrine cells, horizontal cells, bipolar cells, Muller glia cells, photoreceptor cells, and RPE cells. In some cases, an AAV vector (e.g., an AAV2 vector) described herein containing an AAV capsid polypeptide (e.g., an AAV2 capsid polypeptide) that includes an amino acid sequence set forth in Table 1E (or a variant thereof) or according to Formula A based on such a set forth sequence can have the ability to infect (a) retinal ganglion cells, amacrine cells, and horizontal cells, (b) retinal ganglion cells, amacrine cells, and bipolar cells, (c) retinal ganglion cells, amacrine cells, and Muller glia cells, (d) retinal ganglion cells, amacrine cells, and photoreceptor cells, (e) retinal ganglion cells, amacrine cells, and RPE cells, (f) amacrine cells, horizontal cells, and bipolar cells, (g) amacrine cells, horizontal cells, and Muller glia cells, (h) amacrine cells, horizontal cells, and photoreceptor cells, (i) amacrine cells, horizontal cells, and RPE cells, (j) horizontal cells, bipolar cells, and Muller glia cells, (k) horizontal cells, bipolar cells, and photoreceptor cells, (1) horizontal cells, bipolar cells, and RPE cells, (m) bipolar cells, Muller glia cells, and photoreceptor cells, (n) bipolar cells, Muller glia cells, and RPE cells, or (o) Muller glia cells, photoreceptor cells, and RPE cells. In some cases, an AAV vector (e.g., an AAV2 vector) provided herein can have the ability to infect and drive mRNA expression of an exogenous nucleic acid in at least 2 percent (e.g., at least about 2.5 percent, at least about 5 percent, at least about 7.5 percent, at least about percent, or at least about 25 percent) of the retinal ganglion cells, at least 2 percent (e.g., at least about 2.5 percent, at least about 5 percent, at least about 7.5 percent, at least about 10 percent, or at least about 25 percent) of the amacrine cells, at least 2 percent (e.g., at least about 2.5 percent, at least about 5 percent, at least about 7.5 percent, at least about 10 percent, or at least about 25 percent) of the horizontal cells, at least 2 percent (e.g., at least about 2.5 percent, at least about 5 percent, at least about 7.5 percent, at least about 10 percent, or at least about 25 percent) of the bipolar cells, at least 2 percent (e.g., at least about 2.5 percent, at least about 5 percent, at least about 7.5 percent, at least about 10 percent, or at least about 25 percent) of the Muller glia cells, at least 2 percent (e.g., at least about 2.5 percent, at least about 5 percent, at least about 7.5 percent, at least about 10 percent, or at least about 25 percent) of the photoreceptor cells, and/or at least 2 percent (e.g., at least about 2.5 percent, at least about 5 percent, at least about 7.5 percent, at least about 10 percent, or at least about 25 percent) of the RPE cells of an eye of a mammal (e.g., a human or a non-human primate) following, for example, an intravitreal administration.

[0193] An AAV vector (e.g., an AAV2 vector) described herein containing an AAV capsid polypeptide (e.g., an AAV2 capsid polypeptide) that includes an amino acid sequence set forth in Table 1F (or a variant thereof) or according to Formula A based on such a set forth sequence can have the ability to infect RPE cells in vivo and deliver exogenous nucleic acid sequence to the infected RPE cells such that the infected RPE cells express the exogenous nucleic acid sequence (e.g., at high levels). In some cases, an AAV vector (e.g., an AAV2 vector) provided herein can have the ability to infect and drive RNA expression of an exogenous nucleic acid sequence in at least 2 percent (e.g., at least about 2.5 percent, at least about 5 percent, at least about 7.5 percent, at least about 10 percent, or at least about 25 percent) of RPE cells of an eye of a mammal (e.g., a human or a non-human primate). In some cases, an AAV vector (e.g., an AAV2 vector) provided herein can have the ability to drive a level of RNA expression of an exogenous nucleic acid sequence in RPE cells of an eye of a mammal (e.g., a human or a non-human primate) that is greater than (e.g., at least 10 percent greater than, at least 25 percent greater than, at least 50 percent greater than, at least 75 percent greater than, or at least 100 percent greater than) the level of RNA expression of an exogenous nucleic acid sequence driven by a control AAV vector having an AAV capsid polypeptide that consists of the amino acid sequence set forth in SEQ ID NO:1 in RPE cells of an eye of a control mammal (e.g., a control human or a control non-human primate).

[0194] An AAV vector (e.g., an AAV2 vector) described herein containing an AAV capsid polypeptide (e.g., an AAV2 capsid polypeptide) that includes an amino acid sequence set forth in Table 1G (or a variant thereof) or according to Formula A based on such a set forth sequence can have the ability to infect photoreceptor cells in vivo and deliver exogenous nucleic acid sequence to the infected photoreceptor cells such that the infected photoreceptor cells express the exogenous nucleic acid sequence. For example, an AAV vector (e.g., an AAV2 vector) described herein containing an AAV capsid polypeptide (e.g., an AAV2 capsid polypeptide) that includes an amino acid sequence set forth in Table 1G (or a variant thereof) or according to Formula A based on such a set forth sequence can have the ability to infect photoreceptor cells in vivo to a greater extent than any other retinal cell type of an eye and deliver exogenous nucleic acid sequence to the infected photoreceptor cells such that the infected photoreceptor cells express the exogenous nucleic acid sequence. In some cases, an AAV vector (e.g., an AAV2 vector) provided herein can have the ability to infect and drive RNA expression of an exogenous nucleic acid sequence in at least 2 percent (e.g., at least about 2.5 percent, at least about 5 percent, at least about 7.5 percent, at least about 10 percent, or at least about 25 percent) of photoreceptor cells of an eye of a mammal (e.g., a human or a non-human primate). In some cases, an AAV vector (e.g., an AAV2 vector) provided herein can have the ability to drive a level of RNA expression of an exogenous nucleic acid sequence in photoreceptor cells of an eye of a mammal (e.g., a human or a non-human primate) that is greater than (e.g., at least 10 percent greater than, at least 25 percent greater than, at least 50 percent greater than, at least 75 percent greater than, or at least 100 percent greater than) the level of RNA expression of an exogenous nucleic acid sequence driven by a control AAV vector having an AAV capsid polypeptide that consists of the amino acid sequence set forth in SEQ ID NO:1 in photoreceptor cells of an eye of a control mammal (e.g., a control human or a control non-human primate).

[0195] An AAV vector (e.g., an AAV2 vector) described herein containing an AAV capsid polypeptide (e.g., an AAV2 capsid polypeptide) that includes an amino acid sequence set forth in Table 1H (or a variant thereof) or according to Formula A based on such a set forth sequence can have the ability to infect retinal ganglion cells in vivo and deliver exogenous nucleic acid sequence to the infected retinal ganglion cells such that the infected retinal ganglion cells express the exogenous nucleic acid sequence. For example, an AAV vector (e.g., an AAV2 vector) described herein containing an AAV capsid polypeptide (e.g., an AAV2 capsid polypeptide) that includes an amino acid sequence set forth in Table 1H (or a variant thereof) or according to Formula A based on such a set forth sequence can have the ability to infect retinal ganglion cells in vivo to a greater extent than any other retinal cell type of an eye and deliver exogenous nucleic acid sequence to the infected retinal ganglion cells such that the infected retinal ganglion cells express the exogenous nucleic acid sequence. In some cases, an AAV vector (e.g., an AAV2 vector) provided herein can have the ability to infect and drive RNA expression of an exogenous nucleic acid sequence in at least 2 percent (e.g., at least about 2.5 percent, at least about 5 percent, at least about 7.5 percent, at least about 10 percent, or at least about 25 percent) of retinal ganglion cells of an eye of a mammal (e.g., a human or a non-human primate). In some cases, an AAV vector (e.g., an AAV2 vector) provided herein can have the ability to drive a level of RNA expression of an exogenous nucleic acid sequence in retinal ganglion cells of an eye of a mammal (e.g., a human or a non-human primate) that is greater than (e.g., at least 10 percent greater than, at least 25 percent greater than, at least 50 percent greater than, at least 75 percent greater than, or at least 100 percent greater than) the level of RNA expression of an exogenous nucleic acid sequence driven by a control AAV vector having an AAV capsid polypeptide that consists of the amino acid sequence set forth in SEQ ID NO:1 in retinal ganglion cells of an eye of a control mammal (e.g., a control human or a control non-human primate).

[0196] An AAV vector (e.g., an AAV2 vector) described herein containing an AAV capsid polypeptide (e.g., an AAV2 capsid polypeptide) that includes an amino acid sequence set forth in Table 11 (or a variant thereof) or according to Formula A based on such a set forth sequence can have the ability to infect bipolar cells of the retina in vivo and deliver exogenous nucleic acid sequence to the infected bipolar cells such that the infected bipolar cells express the exogenous nucleic acid sequence. For example, an AAV vector (e.g., an AAV2 vector) described herein containing an AAV capsid polypeptide (e.g., an AAV2 capsid polypeptide) that includes an amino acid sequence set forth in Table 11 (or a variant thereof) or according to Formula A based on such a set forth sequence can have the ability to infect bipolar cells of the retina in vivo to a greater extent than any other retinal cell type of an eye and deliver exogenous nucleic acid sequence to the infected bipolar cells such that the infected bipolar cells express the exogenous nucleic acid sequence. In some cases, an AAV vector (e.g., an AAV2 vector) provided herein can have the ability to infect and drive RNA expression of an exogenous nucleic acid sequence in at least 2 percent (e.g., at least about 2.5 percent, at least about 5 percent, at least about 7.5 percent, at least about 10 percent, or at least about 25 percent) of bipolar cells of the retina of an eye of a mammal (e.g., a human or a non-human primate). In some cases, an AAV vector (e.g., an AAV2 vector) provided herein can have the ability to drive a level of RNA expression of an exogenous nucleic acid sequence in bipolar cells of the retina of an eye of a mammal (e.g., a human or a non-human primate) that is greater than (e.g., at least 10 percent greater than, at least percent greater than, at least 50 percent greater than, at least 75 percent greater than, or at least 100 percent greater than) the level of RNA expression of an exogenous nucleic acid sequence driven by a control AAV vector having an AAV capsid polypeptide that consists of the amino acid sequence set forth in SEQ ID NO:1 in bipolar cells of the retina of an eye of a control mammal (e.g., a control human or a control non-human primate).

[0197] An AAV vector (e.g., an AAV2 vector) described herein containing an AAV capsid polypeptide (e.g., an AAV2 capsid polypeptide) that includes an amino acid sequence set forth in Table 1J (or a variant thereof) or according to Formula A based on such a set forth sequence can have the ability to infect ON-retinal ganglion cells in vivo and deliver exogenous nucleic acid sequence to the infected ON-retinal ganglion cells such that the infected ON-retinal ganglion cells express the exogenous nucleic acid sequence. For example, an AAV vector (e.g., an AAV2 vector) described herein containing an AAV capsid polypeptide (e.g., an AAV2 capsid polypeptide) that includes an amino acid sequence set forth in Table 1J (or a variant thereof) or according to Formula A based on such a set forth sequence can have the ability to infect ON-retinal ganglion cells in vivo to a greater extent than any other retinal cell type of an eye (e.g., a greater extent than OFF-retinal ganglion cells) and deliver exogenous nucleic acid sequence to the infected ON-retinal ganglion cells such that the infected ON-retinal ganglion cells express the exogenous nucleic acid sequence. In some cases, an AAV vector (e.g., an AAV2 vector) provided herein can have the ability to infect and drive RNA expression of an exogenous nucleic acid sequence in at least 2 percent (e.g., at least about 2.5 percent, at least about 5 percent, at least about 7.5 percent, at least about 10 percent, or at least about 25 percent) of ON-retinal ganglion cells of an eye of a mammal (e.g., a human or a non-human primate). In some cases, an AAV vector (e.g., an AAV2 vector) provided herein can have the ability to drive a level of RNA expression of an exogenous nucleic acid sequence in ON-retinal ganglion cells of an eye of a mammal (e.g., a human or a non-human primate) that is greater than (e.g., at least 10 percent greater than, at least 25 percent greater than, at least 50 percent greater than, at least 75 percent greater than, or at least 100 percent greater than) the level of RNA expression of an exogenous nucleic acid sequence driven by a control AAV vector having an AAV capsid polypeptide that consists of the amino acid sequence set forth in SEQ ID NO:1 in ON-retinal ganglion cells of an eye of a control mammal (e.g., a control human or a control non-human primate).

[0198] An AAV vector (e.g., an AAV2 vector) described herein containing an AAV capsid polypeptide (e.g., an AAV2 capsid polypeptide) that includes an amino acid sequence set forth in Table 1K (or a variant thereof) or according to Formula A based on such a set forth sequence can have the ability to infect OFF-retinal ganglion cells in vivo and deliver exogenous nucleic acid sequence to the infected OFF-retinal ganglion cells such that the infected OFF-retinal ganglion cells express the exogenous nucleic acid sequence. For example, an AAV vector (e.g., an AAV2 vector) described herein containing an AAV capsid polypeptide (e.g., an AAV2 capsid polypeptide) that includes an amino acid sequence set forth in Table 1K (or a variant thereof) or according to Formula A based on such a set forth sequence can have the ability to infect OFF-retinal ganglion cells in vivo to a greater extent than any other retinal cell type of an eye (e.g., a greater extent than ON-retinal ganglion cells) and deliver exogenous nucleic acid sequence to the infected OFF-retinal ganglion cells such that the infected OFF-retinal ganglion cells express the exogenous nucleic acid sequence. In some cases, an AAV vector (e.g., an AAV2 vector) provided herein can have the ability to infect and drive RNA expression of an exogenous nucleic acid sequence in at least 2 percent (e.g., at least about 2.5 percent, at least about 5 percent, at least about 7.5 percent, at least about 10 percent, or at least about 25 percent) of OFF-retinal ganglion cells of an eye of a mammal (e.g., a human or a non-human primate). In some cases, an AAV vector (e.g., an AAV2 vector) provided herein can have the ability to drive a level of RNA expression of an exogenous nucleic acid sequence in OFF-retinal ganglion cells of an eye of a mammal (e.g., a human or a non-human primate) that is greater than (e.g., at least 10 percent greater than, at least 25 percent greater than, at least 50 percent greater than, at least 75 percent greater than, or at least 100 percent greater than) the level of RNA expression of an exogenous nucleic acid sequence driven by a control AAV vector having an AAV capsid polypeptide that consists of the amino acid sequence set forth in SEQ ID NO:1 in OFF-retinal ganglion cells of an eye of a control mammal (e.g., a control human or a control non-human primate).

[0199] An AAV vector (e.g., an AAV2 vector) described herein containing an AAV capsid polypeptide (e.g., an AAV2 capsid polypeptide) that includes an amino acid sequence set forth in Table 1L (or a variant thereof) or according to Formula A based on such a set forth sequence can have increased packaging efficiency, the ability to infect cells (e.g., retinal cells) in vivo or in vitro, and the ability to deliver exogenous nucleic acid sequence to the infected cells such that the infected cells express the exogenous nucleic acid sequence (e.g., at high levels). In some cases, an AAV vector (e.g., an AAV2 vector) provided herein can have a packaging efficiency that is greater than (e.g., at least 10 percent greater than, at least 25 percent greater than, at least 50 percent greater than, at least 75 percent greater than, or at least 100 percent greater than) the packaging efficiency of a comparable AAV vector having an AAV capsid polypeptide that consists of the amino acid sequence of SEQ ID NO:1 (e.g., a wild-type AAV2 vector).

[0200] Examples of retinal cells that can be infected by an AAV vector (e.g., an AAV2 vector) described herein containing an AAV capsid polypeptide (e.g., an AAV2 capsid polypeptide) that includes an amino acid sequence set forth in Table 1 (or a variant thereof) or Formula A include, without limitation, retinal ganglion cells, retinal pigment epithelium cells, photoreceptor cells, bipolar cells, amacrine cells, Muller glia, and horizontal cells.

[0201] This document also provides compositions containing one or more AAV vectors provided herein (e.g., one or more AAV2 vectors provided herein). For example, one or more AAV vectors provided herein (e.g., one or more AAV2 vectors provided herein) can be 19.5 formulated as a pharmaceutical composition for administration to a mammal (e.g., a human or a non-human primate) to treat that mammal. In some cases, one or more AAV vectors provided herein (e.g., one or more AAV2 vectors provided herein) can be formulated as a pharmaceutical composition for administration to a mammal (e.g., a human or a non-human primate) to deliver an exogenous nucleic acid sequence to foveal cones for expression within foveal cones. For example, an AAV vector (e.g., an AAV2 vector) provided herein can be formulated as a pharmaceutical composition for administration to a mammal (e.g., a human or a non-human primate). In some cases, a pharmaceutical composition provided herein can include a pharmaceutically acceptable carrier such as a buffer, a salt, a surfactant, a sugar, a tonicity modifier, or combinations thereof as, for example, described elsewhere (Gervasi et al., Eur. J. Pharmaceutics and Biopharmaceutics, 131:8-24 (2018)). Examples of pharmaceutically acceptable carriers that can be used to make a pharmaceutical composition provided herein include, without limitation, water, lactic acid, citric acid, sodium chloride, sodium citrate, sodium succinate, sodium phosphate, a surfactant (e.g., polysorbate 20, polysorbate 80, or poloxamer 188), dextran 40, or a sugar (e.g., sorbitol, mannitol, sucrose, dextrose, or trehalose), or combinations thereof. For example, a pharmaceutical composition designed to include an AAV vector (e.g., an AAV2 vector) provided herein can be formulated to include a buffer (e.g., an acetate, citrate, histidine, succinate, phosphate, or hydroxymethyl-aminomethane (Tris) buffer), a surfactant (e.g., polysorbate 20, polysorbate 80, or poloxamer 188), and a sugar such as sucrose. Other ingredients that can be included within a pharmaceutical composition provided herein include, without limitation, amino acids such as glycine or arginine, antioxidants such as ascorbic acid, methionine, or ethylenediaminetetraacetic acid (EDTA), or combinations thereof.

[0202] In some cases, when a pharmaceutical composition is formulated to include one or more AAV vectors (e.g., one or more AAV2 vectors) provided herein, any appropriate titer of the AAV vectors can be used. For example, a pharmaceutical composition provided herein can be formulated to have AAV vectors (e.g., AAV2 vectors) provided herein at a titer that is greater than 1×10⁷ (e.g., greater than 1×10⁸, greater than 1×10⁹, greater than 1×10¹⁰, greater than 1×10¹¹, greater than 1×10¹², greater than 1×10¹³, or greater than 1×10¹⁴). In some cases, a pharmaceutical composition provided herein can be formulated to have AAV vectors (e.g., AAV2 vectors) provided herein at a titer that is from about 1×10⁷ to about 1×10¹⁴ (e.g., from about 1×10⁷ to about 1×10¹³, from about 1×10⁷ to about 1×10¹², from about 1×10⁷ to about 1×10¹¹, from about 1×10⁷ to about 1×10¹⁰, from about 1×10⁸ to about 1×10¹⁴, from about 1×10⁹ to about 1×10¹⁴, from about 1×10¹⁰ to about 1×10¹⁴, from about 1×10⁸ to about 1×10¹², or from about 1×10⁹ to about 1×10¹¹).

[0203] A pharmaceutical composition provided herein can be in any appropriate form. For example, a pharmaceutical composition provided herein can be designed to be a liquid, a semi-solid, or a solid. In some cases, a pharmaceutical composition provided herein can be a liquid solution (e.g., an injectable and/or infusible solution), a dispersion, a suspension, a tablet, a pill, a powder, a microemulsion, a liposome, or a suppository. In some cases, a pharmaceutical composition provided herein can be lyophilized. In some cases, a pharmaceutical composition provided herein (e.g., a pharmaceutical composition that includes one or more AAV vectors provided herein such as one or more AAV2 vectors provided herein) can be formulated with a carrier or coating designed to protect against rapid release. For example, a pharmaceutical composition provided herein can be formulated as a controlled release formulation or as a regulated release formulation as described elsewhere (U.S. Patent Application Publication Nos. 2019/0241667; 2019/0233522; and 2019/0233498).

[0204] This document also provides nucleic acid molecules encoding an AAV capsid polypeptide that includes an amino acid sequence set forth in any one or more of Tables 1A-1L (or a variant thereof) or according to Formula A based on such a set forth sequence. In some cases, a nucleic acid molecule can be designed to encode an AAV capsid polypeptide that includes an amino acid sequence that is encoded by a DNA sequence set forth in any one or more of Tables 1A-1L (e.g., any one of SEQ ID NOs:A20-A37, SEQ ID NOs:B318-B649, SEQ ID NOs:C46-C88, SEQ ID NOs:D79-D155, SEQ ID NOs:E84-E165, SEQ ID NOs:F11-F19, SEQ ID NOs:G78-G153, SEQ ID NOs:H259-H515, SEQ ID NOs:I75-1147, SEQ ID NOs:J65-J127, SEQ ID NOs:K64-K125, and SEQ ID NOs:L28-L53).

[0205] This document also provides nucleic acid molecules encoding an AAV vector (e.g., an AAV2 vector) described herein. For example, an isolated nucleic acid molecule can be designed to encode one or more AAV vectors provided herein (e.g., an AAV having an AAV capsid polypeptide that includes an amino acid sequence set forth in any one or more of Tables 1A-1L (or a variant thereof) or according to Formula A based on such a set forth sequence). In some cases, a nucleic acid molecule can be designed to encode an AAV vector having an AAV capsid polypeptide that includes an amino acid sequence that is encoded by a DNA sequence set forth in any one or more of Tables 1A-1L (e.g., any one of SEQ ID NOs:A20-A37, SEQ ID NOs:B318-B649, SEQ ID NOs:C46-C88, SEQ ID NOs:D79-D155, SEQ ID NOs:E84-E165, SEQ ID NOs:F11-F19, SEQ ID NOs:G78-G153, SEQ ID NOs:H259-H515, SEQ ID NOs:I75-I147, SEQ ID NOs:J65-J127, SEQ ID NOs:K64-K125, and SEQ ID NOs:L28-L53).

[0206] This document also provides host cells containing a nucleic acid molecule provided herein. For example, a host cell can be designed to include a nucleic acid molecule encoding an AAV capsid polypeptide described herein and/or a nucleic acid molecule encoding an AAV vector described herein. In some cases, a host cell can be designed to include a nucleic acid molecule encoding an AAV capsid polypeptide that includes an amino acid sequence set forth in any one or more of Tables 1A-1L (or a variant thereof) or according to Formula A based on such a set forth sequence. In some cases, a host cell can be designed to include a nucleic acid molecule encoding an AAV vector having an AAV capsid polypeptide that includes an amino acid sequence set forth in any one or more of Tables 1A-1L (or a variant thereof) or according to Formula A based on such a set forth sequence. Examples of host cells that can be designed to include a nucleic acid molecule encoding an AAV capsid polypeptide described herein and/or a nucleic acid molecule encoding an AAV vector described herein include, without limitation, HEK293T cells (ATCC), 293AAV cells (Cell Biolabs), NEB 5-alpha cells, TakaraBio Stellar cells, and MegaX cells. Any appropriate method can be used to introduce a nucleic acid molecule provided herein (e.g., a nucleic acid molecule encoding an AAV capsid polypeptide described herein and/or an AAV vector described herein) into a cell. For example, viral transfection, electroporation, transient transfection, and gene gun techniques can be used to introduce a nucleic acid molecule provided herein into a cell.

[0207] This document also provides methods and materials for making an AAV vector (e.g., an AAV2 vector) provided herein. For example, this document provides methods and materials for making AAV vectors (e.g., AAV2 vectors) containing an AAV capsid polypeptide that includes an amino acid sequence set forth in any one or more of Tables 1A-1L (or a variant thereof) or according to Formula A based on such a set forth sequence. As described herein, an AAV vector can be constructed to include an AAV capsid polypeptide that includes an amino acid sequence set forth in any one or more of Tables 1A-1L (or a variant thereof) or according to Formula A based on such a set forth sequence. Any appropriate method can be used to construct an AAV vector having an AAV capsid polypeptide (e.g., an AAV2 capsid polypeptide) provided herein (e.g., a capsid polypeptide that includes an amino acid sequence set forth in any one or more of Tables 1A-1L (or a variant thereof) or according to Formula A based on such a set forth sequence). For example, molecular cloning and AAV vector production techniques such as those described elsewhere can be used to construct and produce an AAV vector having an AAV capsid polypeptide (e.g., an AAV2 capsid polypeptide) provided herein (see, e.g., Sambrook et al., Molecular Cloning: A Laboratory Manual, 2nd edition, Cold Spring Harbor Laboratory, NY (1989); Ausubel et al., Current Protocols in Molecular Biology, Green Publishing Associates and John Wiley & Sons, New York, N.Y. (1994); Grieger et al., Nat. Protoc., 1(3):1412-28 (2006); and Flannery et al., Methods Mol. Biol., 935:351-69 (2013)). In some cases, AAV vectors can be produced in HEK293T cells (ATCC) or 293AAV cells (Cell Biolabs) using a double or triple transfection method (see, e.g., Grieger et al., Nat. Protoc., 1(3):1412-28 (2006); and Flannery et al., Methods Mol. Biol., 935:351-69 (2013)).

[0208] This document also provides methods and materials for using an AAV vector (e.g., an AAV2 vector) provided herein. For example, this document provides methods and materials for using AAV vectors (e.g., AAV2 vectors) containing an AAV capsid polypeptide that includes an amino acid sequence set forth in any one or more of Tables 1A-1L (or a variant thereof) or according to Formula A based on such a set forth sequence. As described herein, an AAV vector provided herein (e.g., an AAV vector (e.g., an AAV2 vector) containing an AAV capsid polypeptide that includes an amino acid sequence set forth in Table 1A or according to Formula A based on such a set forth sequence) can be used to infect foveal cones in vivo and to deliver an exogenous nucleic acid sequence to the infected foveal cones such that the infected foveal cones express the exogenous nucleic acid sequence.

[0209] As described herein, an AAV vector provided herein (e.g., an AAV vector (e.g., an AAV2 vector) containing an AAV capsid polypeptide that includes an amino acid sequence set forth in Table 1B or according to Formula A based on such a set forth sequence) can be used to infect retinal cells (e.g., retinal ganglion cells, photoreceptor cells, and bipolar cells) in vivo and to deliver an exogenous nucleic acid sequence to the infected retinal cells such that the infected retinal cells express the exogenous nucleic acid sequence (e.g., at high levels).

[0210] As described herein, an AAV vector provided herein (e.g., an AAV vector (e.g., an AAV2 vector) containing an AAV capsid polypeptide that includes an amino acid sequence set forth in Table 1C or according to Formula A based on such a set forth sequence) can be used to infect retinal cells (e.g., retinal ganglion cells, photoreceptor cells, and bipolar cells) across retinal regions (e.g., across two, three, or four different retinal regions) in vivo and to deliver an exogenous nucleic acid sequence to the infected retinal cells such that the infected retinal cells express the exogenous nucleic acid sequence (e.g., at high levels). For example, an AAV vector provided herein (e.g., an AAV vector (e.g., an AAV2 vector) containing an AAV capsid polypeptide that includes an amino acid sequence set forth in Table 1C or according to Formula A based on such a set forth sequence) can be used to infect retinal cells (e.g., retinal ganglion cells, photoreceptor cells, and bipolar cells) across retinal regions such that the AAV vector infects at least about 2 percent (e.g., at least about 2.5 percent, at least about 5 percent, at least about 7.5 percent, at least about 10 percent, or at least about 25 percent) of the retinal cells in the fovea region, at least about 2 percent (e.g., at least about 2.5 percent, at least about 5 percent, at least about 7.5 percent, at least about 10 percent, or at least about 25 percent) of the retinal cells in the parafovea region, at least about 2 percent (e.g., at least about 2.5 percent, at least about 5 percent, at least about 7.5 percent, at least about 10 percent, or at least about 25 percent) of the retinal cells in the vascular arcade region, and/or at least about 2 percent (e.g., at least about 2.5 percent, at least about 5 percent, at least about 7.5 percent, at least about 10 percent, or at least about 25 percent) of the retinal cells in the periphery region of an eye of a mammal (e.g., a human or a non-human primate).

[0211] As described herein, an AAV vector provided herein (e.g., an AAV vector (e.g., an AAV2 vector) containing an AAV capsid polypeptide that includes an amino acid sequence set forth in Table 1D or according to Formula A based on such a set forth sequence) can be used to infect retinal cells of the parafovea region of the eye in vivo and to deliver an exogenous nucleic acid sequence to the infected retinal cells such that the infected retinal cells express the exogenous nucleic acid sequence.

[0212] As described herein, an AAV vector provided herein (e.g., an AAV vector (e.g., an AAV2 vector) containing an AAV capsid polypeptide that includes an amino acid sequence set forth in Table 1E or according to Formula A based on such a set forth sequence) can be used to infect two or more (e.g., two or more, three or more, four or more, five or more, six or more, or seven or more) different retinal cell types within an eye in vivo and to deliver an exogenous nucleic acid sequence to the infected retinal cells such that the infected retinal cells express the exogenous nucleic acid sequence (e.g., at high levels). For example, an AAV vector provided herein (e.g., an AAV vector (e.g., an AAV2 vector) containing an AAV capsid polypeptide that includes an amino acid sequence set forth in Table 1E or according to Formula A based on such a set forth sequence) can be used to infect (a) at least about 2 percent (e.g., at least about 2.5 percent, at least about 5 percent, at least about 7.5 percent, at least about 10 percent, or at least about 25 percent) of the retinal ganglion cells, (b) at least about 2 percent (e.g., at least about 2.5 percent, at least about 5 percent, at least about 7.5 percent, at least about 10 percent, or at least about 25 percent) of the amacrine cells, (c) at least about 2 percent (e.g., at least about 2.5 percent, at least about 5 percent, at least about 7.5 percent, at least about 10 percent, or at least about 25 percent) of the horizontal cells, (d) at least about 2 percent (e.g., at least about 2.5 percent, at least about 5 percent, at least about 7.5 percent, at least about 10 percent, or at least about 25 percent) of the bipolar cells, (e) at least about 2 percent (e.g., at least about 2.5 percent, at least about 5 percent, at least about 7.5 percent, at least about 10 percent, or at least about 25 percent) of the Muller glia cells, (f) at least about 2 percent (e.g., at least about 2.5 percent, at least about 5 percent, at least about 7.5 percent, at least about 10 percent, or at least about 25 percent) of the photoreceptor cells, (g) at least about 2 percent (e.g., at least about 2.5 percent, at least about 5 percent, at least about 7.5 percent, at least about 10 percent, or at least about 25 percent) of the RPE cells, all of (a)-(g), or any combination of two, three, four, five, or six of (a)-(g) of an eye of a mammal (e.g., a human or a non-human primate) following, for example, an intravitreal administration.

[0213] As described herein, an AAV vector provided herein (e.g., an AAV vector (e.g., an AAV2 vector) containing an AAV capsid polypeptide that includes an amino acid sequence set forth in Table 1F or according to Formula A based on such a set forth sequence) can be used to infect RPE cells in vivo and to deliver an exogenous nucleic acid sequence to the infected RPE cells such that the infected RPE cells express the exogenous nucleic acid sequence (e.g., at high levels). For example, an AAV vector provided herein (e.g., an AAV vector (e.g., an AAV2 vector) containing an AAV capsid polypeptide that includes an amino acid sequence set forth in Table 1F or according to Formula A based on such a set forth sequence) can be used to infect RPE cells such that the AAV vector infects at least about 2 percent (e.g., at least about 2.5 percent, at least about 5 percent, at least about 7.5 percent, at least about 10 percent, or at least about 25 percent) of RPE cells of an eye of a mammal (e.g., a human or a non-human primate). As described herein, an AAV vector provided herein (e.g., an AAV vector (e.g., an AAV2 vector) containing an AAV capsid polypeptide that includes an amino acid sequence set forth in Table 1G or according to Formula A based on such a set forth sequence) can be used to infect photoreceptor cells in vivo and to deliver an exogenous nucleic acid sequence to the infected photoreceptor cells such that the infected photoreceptor cells express the exogenous nucleic acid sequence. For example, an AAV vector provided herein (e.g., an AAV vector (e.g., an AAV2 vector) containing an AAV capsid polypeptide that includes an amino acid sequence set forth in Table 1G or according to Formula A based on such a set forth sequence) can be used to infect photoreceptor cells in vivo to a greater extent than any other retinal cell type of an eye and to deliver an exogenous nucleic acid sequence to the infected photoreceptor cells such that the infected photoreceptor cells express the exogenous nucleic acid sequence to a greater extent than any other retinal cell type of an eye.

[0214] As described herein, an AAV vector provided herein (e.g., an AAV vector (e.g., an AAV2 vector) containing an AAV capsid polypeptide that includes an amino acid sequence set forth in Table 1H or according to Formula A based on such a set forth sequence) can be used to infect retinal ganglion cells in vivo and to deliver an exogenous nucleic acid sequence to the infected retinal ganglion cells such that the infected retinal ganglion cells express the exogenous nucleic acid sequence. For example, an AAV vector provided herein (e.g., an AAV vector (e.g., an AAV2 vector) containing an AAV capsid polypeptide that includes an amino acid sequence set forth in Table 1H or according to Formula A based on such a set forth sequence) can be used to infect retinal ganglion cells in vivo to a greater extent than any other retinal cell type of an eye and to deliver an exogenous nucleic acid sequence to the infected retinal ganglion cells such that the infected retinal ganglion cells express the exogenous nucleic acid sequence to a greater extent than any other retinal cell type of an eye.

[0215] As described herein, an AAV vector provided herein (e.g., an AAV vector (e.g., an AAV2 vector) containing an AAV capsid polypeptide that includes an amino acid sequence set forth in Table 1I or according to Formula A based on such a set forth sequence) can be used to infect bipolar cells of the retina in vivo and to deliver an exogenous nucleic acid sequence to the infected bipolar cells such that the infected bipolar cells express the exogenous nucleic acid sequence. For example, an AAV vector provided herein (e.g., an AAV vector (e.g., an AAV2 vector) containing an AAV capsid polypeptide that includes an amino acid sequence set forth in Table 11 or according to Formula A based on such a set forth sequence) can be used to infect bipolar cells of the retina in vivo to a greater extent than any other retinal cell type of an eye and to deliver an exogenous nucleic acid sequence to the infected bipolar cells such that the infected bipolar cells express the exogenous nucleic acid sequence to a greater extent than any other retinal cell type of an eye.

[0216] As described herein, an AAV vector provided herein (e.g., an AAV vector (e.g., an AAV2 vector) containing an AAV capsid polypeptide that includes an amino acid sequence set forth in Table 1J or according to Formula A based on such a set forth sequence) can be used to infect ON-retinal ganglion cells in vivo and to deliver an exogenous nucleic acid sequence to the infected ON-retinal ganglion cells such that the infected ON-retinal ganglion cells express the exogenous nucleic acid sequence. For example, an AAV vector provided herein (e.g., an AAV vector (e.g., an AAV2 vector) containing an AAV capsid polypeptide that includes an amino acid sequence set forth in Table 1J or according to Formula A based on such a set forth sequence) can be used to infect ON-retinal ganglion cells in vivo to a greater extent than any other retinal cell type of an eye (e.g., a greater extent than that of OFF-retinal ganglion cells) and to deliver an exogenous nucleic acid sequence to the infected ON-retinal ganglion cells such that the infected ON-retinal ganglion cells express the exogenous nucleic acid sequence to a greater extent than any other retinal cell type of an eye (e.g., OFF-retinal ganglion cells).

[0217] As described herein, an AAV vector provided herein (e.g., an AAV vector (e.g., an AAV2 vector) containing an AAV capsid polypeptide that includes an amino acid sequence set forth in Table 1K or according to Formula A based on such a set forth sequence) can be used to infect OFF-retinal ganglion cells in vivo and to deliver an exogenous nucleic acid sequence to the infected OFF-retinal ganglion cells such that the infected OFF-retinal ganglion cells express the exogenous nucleic acid sequence. For example, an AAV vector provided herein (e.g., an AAV vector (e.g., an AAV2 vector) containing an AAV capsid polypeptide that includes an amino acid sequence set forth in Table 1K or according to Formula A based on such a set forth sequence) can be used to infect OFF-retinal ganglion cells in vivo to a greater extent than any other retinal cell type of an eye (e.g., a greater extent than that of ON-retinal ganglion cells) and to deliver an exogenous nucleic acid sequence to the infected OFF-retinal ganglion cells such that the infected OFF-retinal ganglion cells express the exogenous nucleic acid sequence to a greater extent than any other retinal cell type of an eye (e.g., ON-retinal ganglion cells).

[0218] As described herein, an AAV vector provided herein (e.g., an AAV vector (e.g., an AAV2 vector) containing an AAV capsid polypeptide that includes an amino acid sequence set forth in Table 1L or according to Formula A based on such a set forth sequence) can be used to improve packaging efficiency. In some cases, an AAV vector provided herein (e.g., an AAV vector (e.g., an AAV2 vector) containing an AAV capsid polypeptide that includes an amino acid sequence set forth in Table 1L or according to Formula A based on such a set forth sequence) can be used to infect cells (e.g., retinal cells) in vivo or in vitro and to deliver an exogenous nucleic acid sequence to the infected cells such that the infected cells express the exogenous nucleic acid sequence (e.g., at high levels).

[0219] In some cases, an AAV vector (e.g., an AAV2 vector) provided herein (e.g., an AAV vector containing an AAV capsid polypeptide that includes an amino acid sequence set forth in any one or more of Tables 1A-1L (or a variant thereof) or according to Formula A based on such a set forth sequence) can be used to treat a retinal condition (e.g., a retinal disease). For example, an AAV vector (e.g., an AAV2 vector) provided herein (e.g., an AAV vector (e.g., an AAV2 vector) containing an AAV capsid polypeptide that includes an amino acid sequence set forth in Table 1A or according to Formula A based on such a set forth sequence) that is designed to contain and drive expression of an exogenous nucleic acid sequence encoding an RNA and/or polypeptide capable of treating a retinal condition (e.g., a retinal disease) can be administered to a mammal (e.g., a human or a non-human primate) having a retinal condition in a manner such that the AAV vector (a) infects foveal cones and (b) drives expression of the delivered exogenous nucleic acid in the infected foveal cones, thereby reducing the severity of one or more symptoms of the retinal condition and/or slowing the progression of the retinal condition. For example, an AAV vector (e.g., an AAV2 vector) provided herein (e.g., an AAV vector (e.g., an AAV2 vector) containing an AAV capsid polypeptide that includes an amino acid sequence set forth in Table 1B or according to Formula A based on such a set forth sequence) that is designed to contain and drive expression of an exogenous nucleic acid sequence encoding an RNA and/or polypeptide capable of treating a retinal condition (e.g., a retinal disease) can be administered to a mammal (e.g., a human or a non-human primate) having a retinal condition in a manner such that the AAV vector (a) infects retinal cells (e.g., retinal ganglion cells, photoreceptor cells, and bipolar cells) and (b) drives expression of the delivered exogenous nucleic acid in the infected retinal cells (e.g., at high levels), thereby reducing the severity of one or more symptoms of the retinal condition and/or slowing the progression of the retinal condition. For example, an AAV vector (e.g., an AAV2 vector) provided herein (e.g., an AAV vector (e.g., an AAV2 vector) containing an AAV capsid polypeptide that includes an amino acid sequence set forth in Table 1C or according to Formula A based on such a set forth sequence) that is designed to contain and drive expression of an exogenous nucleic acid sequence encoding an RNA and/or polypeptide capable of treating a retinal condition (e.g., a retinal disease) can be administered to a mammal (e.g., a human or a non-human primate) having a retinal condition in a manner such that the AAV vector (a) infects retinal cells (e.g., retinal ganglion cells) across at least two, three, or four different retinal regions and (b) drives expression of the delivered exogenous nucleic acid in the infected retinal cells, thereby reducing the severity of one or more symptoms of the retinal condition and/or slowing the progression of the retinal condition. For example, an AAV vector (e.g., an AAV2 vector) provided herein (e.g., an AAV vector (e.g., an AAV2 vector) containing an AAV capsid polypeptide that includes an amino acid sequence set forth in Table 1D or according to Formula A based on such a set forth sequence) that is designed to contain and drive expression of an exogenous nucleic acid sequence encoding an RNA and/or polypeptide capable of treating a retinal condition (e.g., a retinal disease) can be administered to a mammal (e.g., a human or a non-human primate) having a retinal condition in a manner such that the AAV vector (a) infects retinal cells of the parafovea region of the eye and (b) drives expression of the delivered exogenous nucleic acid in the infected retinal cells of the parafovea region, thereby reducing the severity of one or more symptoms of the retinal condition and/or slowing the progression of the retinal condition. For example, an AAV vector (e.g., an AAV2 vector) provided herein (e.g., an AAV vector (e.g., an AAV2 vector) containing an AAV capsid polypeptide that includes an amino acid sequence set forth in Table 1E or according to Formula A based on such a set forth sequence) that is designed to contain and drive expression of an exogenous nucleic acid sequence encoding an RNA and/or polypeptide capable of treating a retinal condition (e.g., a retinal disease) can be administered to a mammal (e.g., a human or a non-human primate) having a retinal condition in a manner such that the AAV vector (a) infects two or more (e.g., two or more, three or more, four or more, five or more, six or more, or seven or more) different retinal cell types within an eye and (b) drives expression of the delivered exogenous nucleic acid in the infected retinal cells (e.g., at high levels), thereby reducing the severity of one or more symptoms of the retinal condition and/or slowing the progression of the retinal condition. For example, an AAV vector (e.g., an AAV2 vector) provided herein (e.g., an AAV vector (e.g., an AAV2 vector) containing an AAV capsid polypeptide that includes an amino acid sequence set forth in Table 1F or according to Formula A based on such a set forth sequence) that is designed to contain and drive expression of an exogenous nucleic acid sequence encoding an RNA and/or polypeptide capable of treating a retinal condition (e.g., a retinal disease) can be administered to a mammal (e.g., a human or a non-human primate) having a retinal condition in a manner such that the AAV vector (a) infects RPE cells and (b) drives expression of the delivered exogenous nucleic acid in the infected RPE cells (e.g., at high levels), thereby reducing the severity of one or more symptoms of the retinal condition and/or slowing the progression of the retinal condition. For example, an AAV vector (e.g., an AAV2 vector) provided herein (e.g., an AAV vector (e.g., an AAV2 vector) containing an AAV capsid polypeptide that includes an amino acid sequence set forth in Table 1G or according to Formula A based on such a set forth sequence) that is designed to contain and drive expression of an exogenous nucleic acid sequence encoding an RNA and/or polypeptide capable of treating a retinal condition (e.g., a retinal disease) can be administered to a mammal (e.g., a human or a non-human primate) having a retinal condition in a manner such that the AAV vector (a) infects photoreceptor cells and (b) drives expression of the delivered exogenous nucleic acid in the infected photoreceptor cells, thereby reducing the severity of one or more symptoms of the retinal condition and/or slowing the progression of the retinal condition. For example, an AAV vector (e.g., an AAV2 vector) provided herein (e.g., an AAV vector (e.g., an AAV2 vector) containing an AAV capsid polypeptide that includes an amino acid sequence set forth in Table 1H or according to Formula A based on such a set forth sequence) that is designed to contain and drive expression of an exogenous nucleic acid sequence encoding an RNA and/or polypeptide capable of treating a retinal condition (e.g., a retinal disease) can be administered to a mammal (e.g., a human or a non-human primate) having a retinal condition in a manner such that the AAV vector (a) infects retinal ganglion cells and (b) drives expression of the delivered exogenous nucleic acid in the infected retinal ganglion cells, thereby reducing the severity of one or more symptoms of the retinal condition and/or slowing the progression of the retinal condition. For example, an AAV vector (e.g., an AAV2 vector) provided herein (e.g., an AAV vector (e.g., an AAV2 vector) containing an AAV capsid polypeptide that includes an amino acid sequence set forth in Table 11 or according to Formula A based on such a set forth sequence) that is designed to contain and drive expression of an exogenous nucleic acid sequence encoding an RNA and/or polypeptide capable of treating a retinal condition (e.g., a retinal disease) can be administered to a mammal (e.g., a human or a non-human primate) having a retinal condition in a manner such that the AAV vector (a) infects bipolar cells of the retina and (b) drives expression of the delivered exogenous nucleic acid in the infected bipolar cells, thereby reducing the severity of one or more symptoms of the retinal condition and/or slowing the progression of the retinal condition. For example, an AAV vector (e.g., an AAV2 vector) provided herein (e.g., an AAV vector (e.g., an AAV2 vector) containing an AAV capsid polypeptide that includes an amino acid sequence set forth in Table 1J or according to Formula A based on such a set forth sequence) that is designed to contain and drive expression of an exogenous nucleic acid sequence encoding an RNA and/or polypeptide capable of treating a retinal condition (e.g., a retinal disease) can be administered to a mammal (e.g., a human or a non-human primate) having a retinal condition in a manner such that the AAV vector (a) infects ON-retinal ganglion cells and (b) drives expression of the delivered exogenous nucleic acid in the infected ON-retinal ganglion cells, thereby reducing the severity of one or more symptoms of the retinal condition and/or slowing the progression of the retinal condition. For example, an AAV vector (e.g., an AAV2 vector) provided herein (e.g., an AAV vector (e.g., an AAV2 vector) containing an AAV capsid polypeptide that includes an amino acid sequence set forth in Table 1K or according to Formula A based on such a set forth sequence) that is designed to contain and drive expression of an exogenous nucleic acid sequence encoding an RNA and/or polypeptide capable of treating a retinal condition (e.g., a retinal disease) can be administered to a mammal (e.g., a human or a non-human primate) having a retinal condition in a manner such that the AAV vector (a) infects OFF-retinal ganglion cells and (b) drives expression of the delivered exogenous nucleic acid in the infected OFF-retinal ganglion cells, thereby reducing the severity of one or more symptoms of the retinal condition and/or slowing the progression of the retinal condition. For example, an AAV vector (e.g., an AAV2 vector) provided herein (e.g., an AAV vector (e.g., an AAV2 vector) containing an AAV capsid polypeptide that includes an amino acid sequence set forth in Table 1L or according to Formula A based on such a set forth sequence) that is designed to contain and drive expression of an exogenous nucleic acid sequence encoding an RNA and/or polypeptide capable of treating a retinal condition (e.g., a retinal disease) can be administered to a mammal (e.g., a human or a non-human primate) having a retinal condition in a manner such that the AAV vector (a) infects retinal cells and (b) drives expression of the delivered exogenous nucleic acid in the infected retinal cells (e.g., at high levels), thereby reducing the severity of one or more symptoms of the retinal condition and/or slowing the progression of the retinal condition.

[0220] As described herein, an AAV vector (e.g., an AAV2 vector) provided herein can be designed to include and drive expression of an exogenous nucleic acid sequence encoding any appropriate RNA of interest and/or polypeptide of interest. When an AAV vector provided herein is designed to treat a retinal condition (e.g., a retinal disease), an exogenous nucleic acid sequence that encodes an RNA and/or polypeptide capable of treating the retinal condition can be included within the AAV vector. Examples of RNAs that can be encoded by an exogenous nucleic acid sequence designed to treat a retinal condition (e.g., a retinal disease) and designed to be included within an AAV vector provided herein include, without limitation, SIRNA-027 to treat, e.g., sub-foveal CNVM secondary to age-related macular degeneration (see, e.g., NCT00363714), Cand5/Bevasiranib to treat, e.g., diabetic macular edema (see, e.g., NCT00306904), PF-04523655 to treat, e.g., diabetic macular edema (see, e.g., NCT01445899), QPI-1007 to treat, e.g., optic nerve atrophy in NAION (see, e.g., NCT01064505), Aganirsen to treat, e.g., ischemic CRVO to prevent neovascular glaucoma (see, e.g., NCT02947867), QR-421a to treat, e.g., retinitis pigmentosa/Usher syndrome type 2 (see, e.g., NCT03780257), QR-1123 to treat, e.g., autosomal dominant retinitis pigmentosa (see, e.g., NCT04123626), IONIS-FB-LRx to treat, e.g., geographic atrophy secondary to age-related macular degeneration (see, e.g., NCT03815825), and Sepofarsen/QR-110 to treat, e.g., Leber's congenital amaurosis (see, e.g., NCT03913143). Examples of polypeptides that can be encoded by an exogenous nucleic acid sequence designed to treat a retinal condition (e.g., a retinal disease) and designed to be included within an AAV vector provided herein include, without limitation, an ABCA4 polypeptide, a CRB1 polypeptide, an NPHP5 polypeptide, an NR2E3 polypeptide, a PDE6A polypeptide, a PDE6B polypeptide, a PDE6C polypeptide, a PRPF31 polypeptide, a RPE65 polypeptide, a RPGR polypeptide, a RS1 polypeptide, a TYR polypeptide, a USH2A polypeptide, a MYO7A polypeptide, an REP1 polypeptide, an OPN1LW polypeptide, an OPN1MW polypeptide, a CNGA3 polypeptide, a CNGB3 polypeptide, a GUCY2D polypeptide, a GACA1A polypeptide, a GNAT2 polypeptide, a PDE6H polypeptide, a PROM1 polypeptide, a PRPH2 polypeptide, a CRX polypeptide, an NPHP5 polypeptide, an EYS polypeptide, an ND4 polypeptide, a CLN1-14 polypeptide (e.g., a CLN3 polypeptide, a CLN5 polypeptide, a CLN6 polypeptide, or a CLN8 polypeptide), an NYX polypeptide, a GRM6 polypeptide, a TRPM1 polypeptide, a GPR179 polypeptide, an LRIT3 polypeptide, a glial cell derived neurotrophic factor (GDNF) polypeptide, a brain-derived neurotrophic factor (BDNF) polypeptide, a fibroblast growth factor (FGF) polypeptide, a truncated rod-derived cone viability factor (RdCVF) polypeptide, a full-length rod-derived cone viability factor (RdCVFL) polypeptide, an X-linked inhibitor of apoptosis (XIAP) polypeptide, a soluble fms-related receptor tyrosine kinase 1 (sFLT) polypeptide, a CYP4V2 polypeptide, a palmitoyl protein thioesterase 1 polypeptide, a tripeptidyl peptidase 1 polypeptide, a DNAJC5 polypeptide, a MFSD8 polypeptide, a cathepsin D polypeptide, a granulin polypeptide, an ATP13A2 polypeptide, a cathepsin F polypeptide, a KCTD7 polypeptide, a “P” gene polypeptide, a TRP1 polypeptide, a MATP (SLC45A2) polypeptide, a SLC24A5 polypeptide, a LRMDA polypeptide, a GPR143 polypeptide, an RPGR-exon 1-ORF15 polypeptide, an USH2b polypeptide, an USH1C polypeptide, a CDH23 polypeptide, a PCDH15 polypeptide, a SANS polypeptide, an USH1H polypeptide, a CIB2 polypeptide, an USH1K polypeptide, an ADGRV1 polypeptide, a WHRN polypeptide, a PDZD7 polypeptide, a CLRN1 polypeptide, a HARS polypeptide, an RP2 polypeptide, a FAM161 polypeptide, a DLK polypeptide, a RHO polypeptide, a CHM polypeptide, a BEST1 polypeptide, a RP1 polypeptide, an OPA1 polypeptide, a CEP290 polypeptide, a RDH12 polypeptide, a CACNA1F polypeptide, a BBS1 polypeptide, a FAM161A polypeptide, a CERKL polypeptide, a PRPF8 polypeptide, a RP1L1 polypeptide, a SNRNP200 polypeptide, an IMPG2 polypeptide, a CDHR1 polypeptide, an IMPDH1 polypeptide, a CNGB1 polypeptide, a MERTK polypeptide, a KCNV2 polypeptide, an AIPL1 polypeptide, a RPGRIP1 polypeptide, a TULP1 polypeptide, a C2ORF71 (aka PCARE) polypeptide, a MAK polypeptide, a TIMP3 polypeptide, a GUCA1A polypeptide, an ALMS1 polypeptide, a BBS10 polypeptide, an IFT140 polypeptide, a CNGA1 polypeptide, a NMNAT1 polypeptide, a COL2A1 polypeptide, an EFEMPI polypeptide, a WFS1 polypeptide, a RDH5 polypeptide, a PRPF3 polypeptide, a LRP5 polypeptide, a TOPORS polypeptide, a DHDDS polypeptide, a LCA5 polypeptide, an IQCB1 polypeptide, a RP9 polypeptide, an ATXN7 polypeptide, a BBS2 polypeptide, a SAG RLBP1 polypeptide, a ND6 (MT-ND6) polypeptide, a C1QTNF5 polypeptide, a VPS13B polypeptide, a KIF11 polypeptide, a MT-TL1 polypeptide, a KLHL7 polypeptide, an ACO2 polypeptide, a C21orf2 (aka CFAP410) polypeptide, an AHI1 polypeptide, a KIZ polypeptide, a SPATA7 polypeptide, a TTLL5 polypeptide, an HGSNAT polypeptide, a NRL polypeptide, an OAT polypeptide, a FLVCR1 polypeptide, an ABCC6 polypeptide, a LRAT polypeptide, a CEP78 polypeptide, a CDH3 polypeptide, a FZD4 polypeptide, a BBS12 polypeptide, an HK1 polypeptide, a PRDM13 polypeptide, an ADAM9 polypeptide, a BBS7 polypeptide, a CABP4 polypeptide, an ABHD12 polypeptide, a COL18A1 polypeptide, a MFRP polypeptide, a RIMS1 polypeptide, a ROM1 polypeptide, a BBS4 polypeptide, an IMPG1 polypeptide, an INPP5E polypeptide, a VCAN polypeptide, a POClB polypeptide, a RAX2 polypeptide, a TSPAN12 polypeptide, a CACNA2D4 polypeptide, a JAG1 polypeptide, a MKKS polypeptide, a NPHP4 polypeptide, a BBS9 polypeptide, a COL11A1 polypeptide, an ELOVL4 polypeptide, a NDP polypeptide, a NPHP1 polypeptide, a RGR polypeptide, a BBS5 polypeptide, a WDR19 polypeptide, a C8ORF37 polypeptide, a CTNNA1 polypeptide, a LAMP2 polypeptide, a PEX1 polypeptide, a PHYH polypeptide, an ATF6 polypeptide, a PRPS1 polypeptide, a SEMA4A polypeptide, an ARL6 polypeptide, a CNNM4 polypeptide, an OTX2 polypeptide, a PRPF6 polypeptide, a RBP3 polypeptide, a PNPLA6 polypeptide, a SLC24A1 polypeptide, an USH1G polypeptide, a PITPNM3 polypeptide, a TTC8 polypeptide, an ARSG polypeptide, a CWC27 polypeptide, a DRAM2 polypeptide, a PRCD polypeptide, a REEP6 polypeptide, a SSBP1 polypeptide, a LAMA1 polypeptide, a RAB28 polypeptide, a ZNF408 polypeptide, a GNAT1 polypeptide, an IDH3A polypeptide, a PDE6G polypeptide, a PEX6 polypeptide, a TUB polypeptide, a CEP250 polypeptide, a FSCN2 polypeptide, a GRK1 polypeptide, a RBP4 polypeptide, a RD3 polypeptide, an AGBL5 polypeptide, a CAPN5 polypeptide, an IFT172 polypeptide, a KCNJ13 polypeptide, a PAX2 polypeptide, a CC2D2A polypeptide, a HMCN1 polypeptide, a MT-ATP6 polypeptide, a RCBTB1 polypeptide, an ARL2BP polypeptide, a CA4 polypeptide, a DFNB31 polypeptide, a GNB3 polypeptide, a MMACHC polypeptide, a PRPF4 polypeptide, a RGS9 polypeptide, an ARHGEF18 polypeptide, a KIAA1549 polypeptide, a MKS1 polypeptide, a MTTP (not MT-TP) polypeptide, a PLK4 polypeptide, a RPGRIP1L polypeptide, a SDCCAG8 polypeptide, a SRD5A3 polypeptide, a TUBB4B polypeptide, an ADAMTS18 polypeptide, an ARL3 polypeptide, a COL11A2 polypeptide, a MVK polypeptide, a NBAS polypeptide, an OFD1 polypeptide, a P3H2 polypeptide, a RGS9BP polypeptide, a CSPP1 polypeptide, an ITM2B polypeptide, a PANK2 polypeptide, a PEX7 polypeptide, a POMGNT1 polypeptide, a SLC4A7 polypeptide, a TMEM231 polypeptide, a TRNT1 polypeptide, a TUBGCP6 polypeptide, a ZNF513 polypeptide, an AFG3L2 polypeptide, an ARL13B polypeptide, a C5ORF42 (aka CPLANE1) polypeptide, a COL9A1 polypeptide, a CTSD polypeptide, a DTHD1 polypeptide, a DYNC2H1 polypeptide, an IFT81 polypeptide, a KIAA0586 polypeptide, a MFN2 polypeptide, a NPHP3 polypeptide, a PCYT1A polypeptide, a PEX12 polypeptide, a PLA2G5 polypeptide, a POC5 polypeptide, a SCAPER polypeptide, a SLC25A46 polypeptide, a TMEM237 polypeptide, a TRAF3IP1 polypeptide, a TTC21B polypeptide, a TUBGCP4 polypeptide, an ADIPOR1 polypeptide, a CEP164 polypeptide, a CLCC1 polypeptide, a COL9A2 polypeptide, a CTNNB1 polypeptide, a DHX38 polypeptide, a GNPTG polypeptide, a GRN polypeptide, a GUCAIB polypeptide, an IFT27 polypeptide, an IFT74 polypeptide, a KIAA0556 polypeptide, a LRP2 polypeptide, a MAPKAPK3 polypeptide, a MIR204 polypeptide, a MT-ND3 polypeptide, a MT-RNR1 polypeptide, a MT-TS2 polypeptide, a ND5 (MT-ND5) polypeptide, a NEK2 polypeptide, an OPN1 SW polypeptide, a PEX13 polypeptide, a PEX2 polypeptide, a RHBDD2 polypeptide, a SAMD11 polypeptide, a SCLT1 polypeptide, a SLC7A14 polypeptide, a TCTN1 polypeptide, a TCTN2 polypeptide, a TLCD3B polypeptide, a TREX1 polypeptide, a TTPA polypeptide, an UNC119 polypeptide, a WDPCP polypeptide, an ACBD5 polypeptide, an AHR polypeptide, an ARMC9 polypeptide, an ASRGL1 polypeptide, an ATOH7 polypeptide, a B9D1 polypeptide, a B9D2 polypeptide, a BBIP1 polypeptide, a C12ORF65 polypeptide, a C2CD3 polypeptide, a C5AR2 polypeptide, a CCDCl88 polypeptide, a CCT2 polypeptide, a CEP104 polypeptide, a CEP120 polypeptide, a CEP19 polypeptide, a CEP41 polypeptide, a CISD2 polypeptide, a CLUAP1 polypeptide, a COL9A3 polypeptide, a CRB2 polypeptide, a CTC1 polypeptide, a DACT2 polypeptide, a DDR1 polypeptide, an ENSA polypeptide, an ESPN polypeptide, an EXOSC2 polypeptide, a FBN3 polypeptide, a GDF6 polypeptide, a GPR125 polypeptide, a HKDC1 polypeptide, a HMX1 polypeptide, an IDH3B polypeptide, an IFT43 polypeptide, an IFT80 polypeptide, an INVS polypeptide, a KIAA0753 polypeptide, a KIF3B polypeptide, a KIF7 polypeptide, a LRRTM4 polypeptide, a LZTFL1 polypeptide, a MT-ATP8 polypeptide, a MT-CO1 polypeptide, a MT-C02 polypeptide, a MT-C03 polypeptide, a MT-CYB polypeptide, a MT-ND2 polypeptide, a MT-ND4L polypeptide, a MT-RNR2 polypeptide, a MT-TA polypeptide, a MT-TC polypeptide, a MT-TD polypeptide, a MT-TE polypeptide, a MT-TF polypeptide, a MT-TG polypeptide, a MT-TH polypeptide, a MT-TI polypeptide, a MT-TK polypeptide, a MT-TL2 polypeptide, a MT-TM polypeptide, a MT-TN polypeptide, a MT-TP (Not MTTP) polypeptide, a MT-TQ polypeptide, a MT-TR polypeptide, a MT-TS1 polypeptide, a MT-TT polypeptide, a MT-TV polypeptide, a MT-TW polypeptide, a MT-TY polypeptide, a NEURODI polypeptide, a PDE6D polypeptide, a PEX10 polypeptide, a PEX11B polypeptide, a PEX14 polypeptide, a PEX16 polypeptide, a PEX19 polypeptide, a PEX26 polypeptide, a PEX3 polypeptide, a PEX5 polypeptide, a PGK1 polypeptide, a PISD polypeptide, a PPP2R3C polypeptide, a PROS1 polypeptide, a PSEN1 polypeptide, a RDH11 polypeptide, a RRM2B polypeptide, a SMARCA4 polypeptide, a SPP2 polypeptide, a TCTN3 polypeptide, a TEAD1 polypeptide, a TMEM10⁷ polypeptide, a TMEM138 polypeptide, a TMEM216 polypeptide, a TMEM67 polypeptide, a TPP1 polypeptide, a TRIM32 polypeptide, a USP45 polypeptide, and a ZNF423 polypeptide. In some cases, a polypeptide of interest that can be encoded by an exogenous nucleic acid sequence designed to be included within an AAV vector provided herein can be a MYO7A polypeptide, an USH1C polypeptide, a PCDH15 polypeptide, an USH2A polypeptide, or CLRN1 polypeptide to treat, e.g., Usher Syndrome.

[0221] Any appropriate retinal condition (e.g., a retinal disease) can be treated using an AAV vector (e.g., an AAV2 vector) provided herein (e.g., an AAV vector containing an AAV capsid polypeptide that includes an amino acid sequence set forth in any one or more of Tables 1A-1L (or a variant thereof) or according to Formula A based on such a set forth sequence and an exogenous nucleic acid sequence encoding a therapeutic RNA and/or polypeptide). Examples of such retinal conditions include, without limitation, Leber congenital amaurosis (LCA), Leber hereditary optic neuropathy (LHON), oculocutaneous albinism type 1 (OCA1), retinitis pigmentosa, rod/cone dystrophy, cone dystrophy, rod dystrophy, Stargardt Disease, Usher syndrome, X-linked retinitis pigmentosa (XLRP), X-linked retinoschisis (XLRS), choroideremia, achromatopsia, blue cone monochromacy, color blindness, glaucoma, optic atrophy, Batten disease, congenital stationary night blindness (CSNB), macular degeneration, CRB1-related retinal dystrophy, and foveal cone dystrophy.

[0222] Examples of therapeutic RNAs and polypeptides that can be delivered using an AAV vector provided herein to treat particular retinal conditions are set forth in Tables 2 and 3. Examples of genomic nucleic acids that can be inactivated and/or knocked out to treat particular retinal conditions using one or more AAV vectors provided herein that are designed to deliver gene editing components are set forth in Table 3. Examples of genomic nucleic acids of disease causing alleles that can be replaced with healthy alleles to treat particular retinal conditions using one or more AAV vectors provided herein that are designed to deliver gene editing components are set forth in Table 3.

TABLE 2
Examples of therapeutic polypeptide for treating retinal conditions.

| Retinal Condition | Examples of therapeutic polypeptides |
|---|---|
| Stargardt Disease | ABCA4 |
| Leber congenital amaurosis 8 | CRB1 |
| Leber congenital amaurosis | NPHP5 |
| Retinitis pigmentosa 37 | NR2E3 |
| Rod/Cone dystrophy | PDE6A/PDE6B |
| Rod/Cone dystrophy | PDE6c |
| Retinitis pigmentosa 11 | PRPF31 |
| Leber congenital amaurosis 2 | RPE65 |
| X-linked retinitis pigmentosa | RPGR |
| X-linked retinoschisis | RS1 |
| Oculocutaneous albinism type 1 | TYR |
| Usher syndrome | PCDH15 |
| Usher syndrome | USH2a |
| Usher syndrome | USH2b |
| Usher syndrome, subtype IB caused by | MYO7A |
| mutations in the MYO7A gene | |
| Usher syndrome, subtype IC caused by | USH1C |
| mutations in the USH1C gene | |
| Usher syndrome, subtype ID caused by | CDH23 |
| mutations in the CDH23 gene | |
| Usher syndrome, subtype ID-F caused by | PCDH15 and/or CDH23 |
| mutations in the PCDH15 and/or CDH23 | |
| genes | |
| Usher syndrome, subtype IF caused by | PCDH15 |
| mutations in the PCDH15 gene | |
| Usher syndrome, subtype IG caused by | SANS |
| mutations in the SANS gene | |
| Usher syndrome, subtype IH caused by | USH1H |
| mutations in the USH1H gene | |
| Usher syndrome, subtype IJ caused by | CIB2 |
| mutations in the CIB2 gene | |
| Usher syndrome, subtype IK caused by | USH1K |
| mutations in the USH1K gene | |
| Usher syndrome, subtype IIA, caused by | USH2A |
| mutations in the USH2A | |
| Usher syndrome, subtype IIC caused by | ADGRV1 |
| mutations in the ADGRV1 gene | |
| Usher syndrome, subtype IID caused by | WHRN |
| mutations in the WHRN gene | |
| Usher syndrome, subtype IIC caused by | GPR98 and/or PDZD7 |
| mutations in the GPR98 and/or PDZD7 genes | |
| (ADGRV1 is also known as GPR98) | |
| Usher syndrome, subtype IIIA caused by | CLRN1 |
| mutations in the CLRN1 gene | |
| Usher syndrome, subtype IIIB caused by | IIIB, caused by mutations in the HARS gene |
| mutations in the HARS gene | |
| Retinitis pigmentosa | One or more trophic factors |
| Leber congenital amaurosis | One or more trophic factors |
| Achromatopsia | CNGA3, CNGB3, and/or PDE6H |
| Any blinding disease | Optogenetic tools: Chr, NhpR, ReachR, |
| | and/or others |
| Blue cone monochromacy | OPN1LW and/or OPN1MW |
| Cone dystrophy | GNAT2 |
| Cone-rod dystrophy | PDE6C and/or PROM1 |

TABLE 3
Examples of polypeptide that can be expressed to treat retinal conditions, examples
of polypeptides that can be knocked out to treat retinal conditions, and/or examples
of polypeptides that can be knocked out and replace with an alternative (e.g.,
wild-type or non-disease version) to treat retinal conditions.

| | | | | Gene |
|---|---|---|---|---|
| | | Gene | | editing- |
| Disease | Polypeptide | expression | Gene KO | replacement |
| Achromatopsia | CNGA3 | X | | |
| Achromatopsia | CNGB3 | X | | |
| Achromatopsia | PDE6H | X | | |
| Any blinding disease | Optogenetic | X | | |
| | tools: Chr, | | | |
| | NhpR, and/or | | | |
| | ReachR | | | |
| Batten disease | CTSD | X | | |
| Bietti crystalline dystrophy | CYP4V2 | X | | X |
| Blue cone monochromacy | OPN1LW | X | | |
| Blue cone monochromacy | OPN1MW | X | | |
| Choroideremia | REP1 | X | | |
| Cone dystrophy | PDE6c | X | | |
| Cone dystrophy | GNAT2 | X | | |
| Cone-rod dystrophy | PDE6C | X | | |
| Cone-rod dystrophy | PROM1 | X | | |
| Cone/rod dystrophy | PRPH2 | X | X | X |
| CSNB | NYX | X | | |
| CSNB | GRM6 | X | | |
| CSNB | TRPM1 | X | | |
| CSNB | GPR179 | X | | |
| CSNB | LRIT3 | X | | |
| Glaucoma | Trophic factors | X | | |
| Glaucoma | Complement | X | | |
| | inhibition factors | | | |
| Glaucoma | Apoptosis | X | | |
| | inhibition factors | | | |
| Glaucoma | Survival factors | X | | |
| Glaucoma | Neuroprotective | X | | |
| | factors | | | |
| LCA | NPHP5 | X | | |
| LCA | GUCY2D | X | | |
| Leber congenital amaurosis | RPE65 | X | | |
| Leber congenital amaurosis 8 | CRB1 | X | | X |
| LHON | ND4 | X | | |
| Macular dystrophy | CRX | X | X | X |
| Oculocutaneous albinism | TYR | X | | |
| type 1 | | | | |
| Optic atrophy | CLN1-14 | X | | |
| Retinitis pigmentosa | EYS | X | | X |
| Retinitis pigmentosa | RHO | X | X | X |
| Retinitis pigmentosa | PRPF31 | X | | |
| Retinitis pigmentosa | PDE6A | X | | |
| Bestrophinopathy | BEST1 | X | X | |
| Retinitis pigmentosa | PRPF3 | X | | |
| Retinitis pigmentosa | PRPF8 | X | | |
| Retinitis pigmentosa | TOPORS | X | X | X |
| Retinitis pigmentosa 37 | NR2E3 | X | X | X |
| Rod/Cone dystrophy | PDE6B | X | | |
| RP, LCA, Others | Trophic factors | X | | |
| Stargardt Disease | ABCA4 | X | | X |
| Usher syndrome | PCDH15 | X | | |
| Usher syndrome | USH2A | X | | X |
| Usher syndrome | MYO7A | X | | X |
| XLRP | RPGR | X | | |
| XLRS | RS1 | X | | |
| Wet AMD | Survival factors | X | | |
| Dry AMD | Survival factors | X | | |
| Diabetic retinopathy | Survival factors | X | | |
| Diabetic Macular Edema | Survival factors | X | | |
| Retinitis pigmentosa | Survival factors | X | | |
| Wet AMD | Apoptosis | X | | |
| | inhibition factors | | | |
| Dry AMD | Apoptosis | X | | |
| | inhibition factors | | | |
| Diabetic retinopathy | Apoptosis | X | | |
| | inhibition factors | | | |
| Diabetic Macular Edema | Apoptosis | X | | |
| | inhibition factors | | | |
| Retinitis pigmentosa | Apoptosis | X | | |
| | inhibition factors | | | |
| Wet AMD | Complement | X | | |
| | inhibition factors | | | |
| Dry AMD | Complement | X | | |
| | inhibition factors | | | |
| Diabetic retinopathy | Complement | X | | |
| | inhibition factors | | | |
| Diabetic Macular Edema | Complement | X | | |
| | inhibition factors | | | |
| Wet AMD | Neuroprotective | X | | |
| | factors | | | |
| Dry AMD | Neuroprotective | X | | |
| | factors | | | |
| Diabetic retinopathy | Neuroprotective | X | | |
| | factors | | | |
| Diabetic Macular Edema | Neuroprotective | X | | |
| | factors | | | |
| Retinitis pigmentosa | Neuroprotective | X | | |
| | factors | | | |
| Wet AMD | Anti-VEGF | X | | |
| | polypeptides | | | |
| Diabetic retinopathy | Anti-VEGF | X | | |
| | polypeptides | | | |
| Diabetic Macular Edema | Anti-VEGF | X | | |
| | polypeptides | | | |
| Wet AMD | Optogenetic tools: | X | | |
| | Chr, NhpR, and/or | | | |
| | ReachR | | | |
| Dry AMD | Optogenetic tools: | X | | |
| | Chr, NhpR, and/or | | | |
| | ReachR | | | |
| Diabetic retinopathy | Optogenetic tools: | X | | |
| | Chr, NhpR, and/or | | | |
| | ReachR | | | |
| Diabetic Macular Edema | Optogenetic tools: | X | | |
| | Chr, NhpR, and/or | | | |
| | ReachR | | | |
| Retinitis pigmentosa | Optogenetic tools: | X | | |
| | Chr, NhpR, and/or | | | |
| | ReachR | | | |

[0223] In some cases, a retinal condition can be treated using an AAV vector provided herein that is designed to express one or more polypeptides having the ability to inhibit vascular angiogenesis. Examples of polypeptides having the ability to inhibit vascular angiogenesis that can be used as described herein include, without limitation, monoclonal anti-VEGF antibody polypeptides, angiostatin polypeptides, siRNA polypeptides, and endostatin polypeptides. In some cases, wet AMD can be treated using an AAV vector provided herein that is designed to express a monoclonal anti-VEGF antibody polypeptide, an angiostatin polypeptide, an siRNA, and/or endostatin polypeptide. In some cases, diabetic retinopathy can be treated using an AAV vector provided herein that is designed to express a monoclonal anti-VEGF antibody polypeptide, an angiostatin polypeptide, an siRNA, and/or an endostatin polypeptide. In some cases, diabetic macular edema can be treated using an AAV vector provided herein that is designed to express a monoclonal anti-VEGF antibody polypeptide, an angiostatin polypeptide, an siRNA, and/or an endostatin polypeptide.

[0224] In some cases, a retinal condition can be treated using an AAV vector provided herein that is designed to express one or more polypeptides with neuroprotective capabilities. Examples of polypeptides having the ability to provide neuroprotective activity that can be used as described herein include, without limitation, GDNF polypeptides, CNTF polypeptides, IGF-1 polypeptides, VEGF polypeptides, and BDNF polypeptides. In some cases, wet AMD can be treated using an AAV vector provided herein that is designed to express a GDNF polypeptide, a CNTF polypeptide, an IGF-1 polypeptide, a VEGF polypeptide, and/or a BDNF polypeptide. In some cases, dry AMD can be treated using an AAV vector provided herein that is designed to express a GDNF polypeptide, a CNTF polypeptide, an IGF-1 polypeptide, a VEGF polypeptide, and/or a BDNF polypeptide. In some cases, diabetic retinopathy can be treated using an AAV vector provided herein that is designed to express a GDNF polypeptide, a CNTF polypeptide, an IGF-1 polypeptide, a VEGF polypeptide, and/or a BDNF polypeptide. In some cases, diabetic macular edema can be treated using an AAV vector provided herein that is designed to express a GDNF polypeptide, a CNTF polypeptide, an IGF-1 polypeptide, a VEGF polypeptide, and/or a BDNF polypeptide.

[0225] In some cases, a retinal condition can be treated using an AAV vector provided herein that is designed to express one or more polypeptides having the ability to provide optogenetic capabilities. Examples of polypeptides having the ability to provide optogenetic capabilities that can be used as described herein include, without limitation, ChR polypeptides, ChR2 polypeptides, ArchT polypeptides, NpHR polypeptides, and ChrimsonR polypeptides. In some cases, wet AMD can be treated using an AAV vector provided herein that is designed to express a ChR polypeptide, a ChR2 polypeptide, an ArchT polypeptide, a NpHR polypeptide, and/or a ChrimsonR polypeptide. In some cases, dry AMD can be treated using an AAV vector provided herein that is designed to express a ChR polypeptide, a ChR2 polypeptide, an ArchT polypeptide, a NpHR polypeptide, and/or a ChrimsonR polypeptide. In some cases, diabetic retinopathy can be treated using an AAV vector provided herein that is designed to express a ChR polypeptide, a ChR2 polypeptide, an ArchT polypeptide, a NpHR polypeptide, and/or a ChrimsonR polypeptide. In some cases, diabetic macular edema can be treated using an AAV vector provided herein that is designed to express a ChR polypeptide, a ChR2 polypeptide, an ArchT polypeptide, a NpHR polypeptide, and/or a ChrimsonR polypeptide.

[0226] In some cases, a retinal condition can be treated using an AAV vector provided herein that is designed to express one or more polypeptides having the ability to inhibit apoptosis. Examples of polypeptides having the ability to inhibit apoptosis that can be used as described herein include, without limitation, XIAP polypeptides, cIAP1 polypeptides, C-IAP2 polypeptides, Livin polypeptides, and Survivin polypeptides. In some cases, wet AMD can be treated using an AAV vector provided herein that is designed to express a XIAP polypeptide, a cIAP1 polypeptide, a C-IAP2 polypeptide, a Livin polypeptide, and/or a Survivin polypeptide. In some cases, diabetic retinopathy can be treated using an AAV vector provided herein that is designed to express a XIAP polypeptide, a cIAP1 polypeptide, a C-IAP2 polypeptide, a Livin polypeptide, and/or a Survivin polypeptide. In some cases, diabetic macular edema can be treated using an AAV vector provided herein that is designed to express a XIAP polypeptide, a cIAP1 polypeptide, a C-IAP2 polypeptide, a Livin polypeptide, and/or a Survivin polypeptide.

[0227] In some cases, a retinal condition can be treated using an AAV vector provided herein that is designed to express one or more polypeptides having the ability to inhibit complement. Examples of polypeptides having the ability to inhibit complement that can be used as described herein include, without limitation, Complement Factor I polypeptides, Complement factor H polypeptides, and sCD59 polypeptides. In some cases, wet AMD can be treated using an AAV vector provided herein that is designed to express a Complement Factor I polypeptide, a Complement factor H polypeptide, and/or a sCD59 polypeptide. In some cases, dry AMD can be treated using an AAV vector provided herein that is designed to express a Complement Factor I polypeptide, a Complement factor H polypeptide, and/or a sCD59 polypeptide. In some cases, diabetic retinopathy can be treated using an AAV vector provided herein that is designed to express a Complement Factor I polypeptide, a Complement factor H polypeptide, and/or a sCD59 polypeptide. In some cases, diabetic macular edema can be treated using an AAV vector provided herein that is designed to express a Complement Factor I polypeptide, a Complement factor H polypeptide, and/or a sCD59 polypeptide.

[0228] In some cases, a retinal condition can be treated using an AAV vector provided herein that is designed to express one or more polypeptides having the ability to induce survival factors. Examples of polypeptides having the ability to induce survival factors that can be used as described herein include, without limitation, RdCVF polypeptides, RdCVFL polypeptides, HIF-1 polypeptides, IAP family polypeptides, and BCL-2 family polypeptides. In some cases, wet AMD can be treated using an AAV vector provided herein that is designed to express a RdCVF polypeptide, a RdCVFL polypeptide, an HIF-1 polypeptide, an IAP family polypeptide, and/or a BCL-2 family polypeptide. In some cases, dry AMD can be treated using an AAV vector provided herein that is designed to express a RdCVF polypeptide, a RdCVFL polypeptide, an HIF-1 polypeptide, an IAP family polypeptide, and/or a BCL-2 family polypeptide. In some cases, diabetic retinopathy can be treated using an AAV vector provided herein that is designed to express a RdCVF polypeptide, a RdCVFL polypeptide, an HIF-1 polypeptide, an IAP family polypeptide, and/or a BCL-2 family polypeptide. In some cases, diabetic macular edema can be treated using an AAV vector provided herein that is designed to express a RdCVF polypeptide, a RdCVFL polypeptide, an HIF-1 polypeptide, an IAP family polypeptide, and/or a BCL-2 family polypeptide.

[0229] Any appropriate method can be used to administer an AAV vector provided herein or composition (e.g., a pharmaceutical composition) provided herein to a mammal (e.g., a human or a non-human primate). For example, a composition provided herein (e.g., a pharmaceutical composition containing one or more AAV vectors provided herein) can be administered to a mammal (e.g., a human or a non-human primate) intravitreally, intravenously (e.g., via an intravenous injection or infusion), subcutaneously (e.g., via a subcutaneous injection), intraperitoneally (e.g., via an intraperitoneal injection), orally, via inhalation, intramuscularly (e.g., via intramuscular injection), subretinally, intravitreally, systemically, or suprachoroidally. In some cases, the route and/or mode of administration of a composition (e.g., a pharmaceutical composition provided herein) can be adjusted for the mammal being treated.

[0230] In some cases, an effective amount of a composition containing an AAV vector provided herein (e.g., a pharmaceutical composition provided herein) to treat a retinal condition can be an amount that reduces the severity of one or more symptoms of the retinal condition and/or slows the progression of the retinal condition without producing significant toxicity to the mammal. For example, an effective amount of an AAV vector provided herein can be from about 1×10⁷ viral genomes to about 1×10¹⁴ viral genomes (e.g., from about 1×10¹⁴ viral genomes to about 1×10¹³ viral genomes, from about 1×10⁷ viral genomes to about 1×10¹² viral genomes, from about 1×10⁷ viral genomes to about 1×10¹¹ viral genomes, from about 1×10⁷ viral genomes to about 1×10¹⁰ viral genomes, from about 1×10⁸ viral genomes to about 1×10¹⁴ viral genomes, from about 1×10⁹ viral genomes to about 1×10¹⁴ viral genomes, from about 1×10¹⁰ viral genomes to about 1×10¹⁴ viral genomes, from about 1×10⁸ viral genomes to about 1×10¹² viral genomes, or from about 1×10⁹ viral genomes to about 1×10¹¹ viral genomes). In some cases, an effective amount of an AAV vector provided herein can be from about 1×10¹⁰ viral genomes/kg of body weight to about 1×10¹⁴ viral genomes/kg of body weight (e.g., from about 1×10¹⁰ viral genomes/kg of body weight to about 1×10¹³ viral genomes/kg of body weight, from about 1×10¹⁰ viral genomes/kg of body weight to about 1×10¹² viral genomes/kg of body weight, from about 1×10¹⁰ viral genomes/kg of body weight to about 1×10¹¹ viral genomes/kg of body weight). The effective amount can remain constant or can be adjusted as a sliding scale or variable dose depending on the mammal's response to treatment. Various factors can influence the actual effective amount used for a particular application. For example, the severity of a retinal condition, the route of administration, the age and general health condition of the mammal, excipient usage, the possibility of co-usage with other therapeutic or prophylactic treatments such as use of other retinal drugs, and the judgment of the treating physician may require an increase or decrease in the actual effective amount of a composition provided herein (e.g., a pharmaceutical composition containing an AAV vector provided herein) that is administered.

[0231] In some cases, an effective frequency of administration of a composition containing an AAV vector provided herein (e.g., a pharmaceutical composition provided herein) can be a frequency that reduces the severity of one or more symptoms of the retinal condition and/or slows the progression of the retinal condition without producing significant toxicity to the mammal. Various factors can influence the actual effective frequency used for a particular application. For example, the severity of a retinal condition, the route of administration, the age and general health condition of the mammal, excipient usage, the possibility of co-usage with other therapeutic or prophylactic treatments such as use of other retinal drugs, and the judgment of the treating physician may require an increase or decrease in the actual effective frequency of administration of a composition provided herein.

[0232] In some cases, an effective duration of administration of a composition containing an AAV vector provided herein (e.g., a pharmaceutical composition provided herein) can be a duration that reduces the severity of one or more symptoms of the retinal condition and/or slows the progression of the retinal condition without producing significant toxicity to the mammal. For example, an effective duration of administration of a pharmaceutical composition provided herein can vary from a single time point of administration to several weeks to several months (e.g., 4 to 12 weeks). In some cases, the duration can be for as long as the mammal is alive. Multiple factors can influence the actual effective duration used for a particular application. For example, the severity of a retinal condition, the route of administration, the age and general health condition of the mammal, excipient usage, the possibility of co-usage with other therapeutic or prophylactic treatments such as use of other retinal drugs, and the judgment of the treating physician may require an increase or decrease in the actual effective duration of administration of a composition provided herein (e.g., a pharmaceutical composition containing an AAV vector provided herein).

[0233] In some cases, an effective amount of a composition containing an AAV vector provided herein (e.g., a pharmaceutical composition provided herein) to treat a retinal condition can be administered once or twice to a mammal (e.g., a human or a non-human primate) to treat that mammal.

[0234] The invention will be further described in the following examples, which do not limit the scope of the invention described in the claims.

### EXAMPLES

### Example 1—Construction of AAV Vectors Containing Mutated Capsid Polypeptides

[0235] A high-throughput method was used to create AAV vectors with mutated capsid polypeptides and to screen those created AAV vectors for particular AAV vectors having the ability to exhibit high efficiency and/or specificity for infecting foveal cones in the retina. See, e.g., Öztürk et al., bioRxiv, 2020.10.01.323196 (2020) and Öztürk et al., eLife, 10:e64175 (2021). Briefly, highly complex libraries of AAV mutants were created and injected into the eyes of primates (cynolmolgus macaques or rhesus macaques). These libraries were created such that each AAV vector in the library contained a unique DNA barcode, which allowed for tracking of a mutated AAV capsid polypeptide. In one library version, successfully packaged AAV vectors were polymerase chain reaction (PCR) amplified and repackaged, resulting in a “repack” library. In another library version, AAV vectors were injected into primate retinas, and nucleic acid encoding the AAV capsid polypeptides were then amplified from the nuclei of foveal cells, resulting in an “enriched” library. Each iteration of the AAV library (e.g., the original library, the repack library, and the enriched library) was injected intravitreally into primate eyes.

[0236] After injection, the AAV vectors competed with each other in vivo. Infection of successful AAV vectors led to expression of the DNA barcodes. Single cell suspensions were created from isolated retinal tissue, and single cell microfluidic technology (10X Genomics) was used to create cDNA libraries of individual cells. Computational analysis was performed to identify optimal vectors, according to cell specificities, expression levels, and/or other desirable characteristics, based on the presence and quantity of DNA barcodes in transcriptomes from thousands of different cells of multiple cell types in parallel. The performance of AAV capsid polypeptides was evaluated on the basis of mRNA transcription levels rather than the presence of DNA, reflecting the ability of the AAV vectors to drive expression of the AAV vector nucleic acid as opposed to simply having the ability to enter a cell.

[0237] AAV vectors having capsid polypeptides that included an amino acid sequence of any one of SEQ ID NOs:A2-A18 located between amino acid residues 587 and 588 of SEQ ID NO:1 or an amino acid sequence of SEQ ID NO:A1 as a replacement of amino acid residues 585 to 590 of SEQ ID NO:1 mediated expression in foveal cells (Table 1A). The AAV vectors were ranked based on overall rankings with +++ indicating those that performed in the top ⅓ of vectors tested, with ++ indicating those that performed in middle ⅓ of vectors tested, and with + indicating those that performed in the bottom ⅓ of vectors tested. These were determined in terms of total levels of gene expression in foveal cells. No expression was detected within the limits of detection when the wild-type AAV2 vector was used.

[0238] Taken together, these results demonstrate that AAV vectors that include an AAV capsid polypeptide (e.g., an AAV2 capsid polypeptide) having an amino acid sequence set forth in Table 1A or according to Formula A based on such a set forth sequence can have the ability to mediate transgene expression in foveal cones following intravitreal injection.

### Example 2—Treating a Retinal Condition Using an AAV Vector

[0239] An AAV vector is constructed to include an AAV2 capsid polypeptide having an amino acid sequence set forth in Table 1A (e.g., SEQ ID NO:A2) or according to Formula A based on such a set forth sequence and an exogenous nucleic acid sequence encoding a therapeutic polypeptide. The constructed AAV vector is administered intravitreally to a human identified as having a retinal condition in an amount that is from about 1×10⁷ to about 1×10¹⁴ AAV vectors. After the administration, the severity of one or more symptoms of the retinal condition is reduced and/or the progression of the retinal condition is slowed.

### Example 3—Construction of AAV Vectors Containing Mutated Capsid Polypeptides

[0240] A high-throughput method was used to create AAV vectors with mutated capsid polypeptides and to screen those created AAV vectors for particular AAV vectors having the ability to exhibit high efficiency and/or specificity for infecting retinal cells. See, e.g., Öztürk et al., bioRxiv, 2020.10.01.323196 (2020) and Öztürk et al., eLife, 10:e64175 (2021). Briefly, highly complex libraries of AAV mutants were created and injected into the eyes of primates (cynolmolgus macaques or rhesus macaques). These libraries were created such that each AAV vector in the library contained a unique DNA barcode, which allowed for tracking of a mutated AAV capsid polypeptide. In one library version, successfully packaged AAV vectors were polymerase chain reaction (PCR) amplified and repackaged, resulting in a “repack” library. In another library version, AAV vectors were injected into primate retinas, and nucleic acid encoding the AAV capsid polypeptides were then amplified from the nuclei of foveal cells, resulting in an “enriched” library. Each iteration of the AAV library (e.g., the original library, the repack library, and the enriched library) was injected intravitreally into primate eyes.

[0241] After injection, the AAV vectors competed with each other in vivo. Infection of successful AAV vectors led to expression of the DNA barcodes. Single cell suspensions were created from isolated retinal tissue, and single cell microfluidic technology (10X Genomics) was used to create cDNA libraries of individual cells. Computational analysis was performed to identify optimal vectors, according to cell specificities, expression levels, and/or other desirable characteristics, based on the presence and quantity of DNA barcodes in transcriptomes from thousands of different cells of multiple cell types in parallel. The performance of AAV capsid polypeptides was evaluated on the basis of mRNA transcription levels rather than the presence of DNA, reflecting the ability of the AAV vectors to drive expression of the AAV vector nucleic acid as opposed to simply having the ability to enter a cell.

[0242] AAV vectors having capsid polypeptides that included an amino acid sequence of any one of SEQ ID NOs:B2-B298 located between amino acid residues 587 and 588 of SEQ ID NO:1 or an amino acid sequence of any one of SEQ ID NOs:B299-B317 as a replacement of amino acid residues 585 to 590 of SEQ ID NO:1 mediated expression in retinal cells (Table 1). The AAV vectors were ranked based on overall rankings with +++ indicating those that performed in the top ⅓ of vectors tested, with ++ indicating those that performed in middle ⅓ of vectors tested, and with + indicating those that performed in the bottom ⅓ of vectors tested. These were determined in terms of total levels of gene expression in retinal cells. No expression was detected within the limits of detection when the wild-type AAV2 vector was used.

[0243] Taken together, these results demonstrate that AAV vectors that include an AAV capsid polypeptide (e.g., an AAV2 capsid polypeptide) having an amino acid sequence set forth in Table 1B or according to Formula A based on such a set forth sequence can have the ability to mediate transgene expression (e.g., high expression) in retinal cells following intravitreal injection.

### Example 4—Treating a Retinal Condition Using an AAV Vector

[0244] An AAV vector is constructed to include an AAV2 capsid polypeptide having an amino acid sequence set forth in Table 1B (e.g., SEQ ID NO:B2) or according to Formula A based on such a set forth sequence and an exogenous nucleic acid sequence encoding a therapeutic polypeptide. The constructed AAV vector is administered intravitreally to a human identified as having a retinal condition in an amount that is from about 1×10⁷ to about 1×10¹⁴ AAV vectors. After the administration, the severity of one or more symptoms of the retinal condition is reduced and/or the progression of the retinal condition is slowed.

### Example 5—Construction of AAV Vectors Containing Mutated Capsid Polypeptides

[0245] A high-throughput method was used to create AAV vectors with mutated capsid polypeptides and to screen those created AAV vectors for particular AAV vectors having the ability to exhibit high efficiency and/or specificity for infecting retinal cells. See, e.g., Öztürk et al., bioRxiv, 2020.10.01.323196 (2020) and Öztürk et al., eLife, 10:e64175 (2021). Briefly, highly complex libraries of AAV mutants were created and injected into the eyes of primates (cynolmolgus macaques or rhesus macaques). These libraries were created such that each AAV vector in the library contained a unique DNA barcode, which allowed for tracking of a mutated AAV capsid polypeptide. In one library version, successfully packaged AAV vectors were polymerase chain reaction (PCR) amplified and repackaged, resulting in a “repack” library. In another library version, AAV vectors were injected into primate retinas, and nucleic acid encoding the AAV capsid polypeptides were then amplified from the nuclei of foveal cells, resulting in an “enriched” library. Each iteration of the AAV library (e.g., the original library, the repack library, and the enriched library) was injected intravitreally into primate eyes.

[0246] After injection, the AAV vectors competed with each other in vivo. Infection of successful AAV vectors led to expression of the DNA barcodes. Single cell suspensions were created from isolated retinal tissue, and single cell microfluidic technology (10X Genomics) was used to create cDNA libraries of individual cells. Computational analysis was performed to identify optimal vectors, according to cell specificities, expression levels, and/or other desirable characteristics, based on the presence and quantity of DNA barcodes in transcriptomes from thousands of different cells of multiple cell types in parallel. The performance of AAV capsid polypeptides was evaluated on the basis of mRNA transcription levels rather than the presence of DNA, reflecting the ability of the AAV vectors to drive expression of the AAV vector nucleic acid as opposed to simply having the ability to enter a cell.

[0247] AAV vectors having capsid polypeptides that included an amino acid sequence of any one of SEQ ID NOs:C2-C43 located between amino acid residues 587 and 588 of SEQ ID NO:1 or an amino acid sequence of any one of SEQ ID NOs:C44-C45 as a replacement of amino acid residues 585 to 590 of SEQ ID NO:1 mediated expression in retinal cells across two or more retinal regions. The AAV vectors were ranked based on overall rankings with +++ indicating those that performed in the top ⅓ of vectors tested, with ++ indicating those that performed in middle ⅓ of vectors tested, and with + indicating those that performed in the bottom ⅓ of vectors tested. These were determined in terms of total levels of gene expression across retinal regions. No expression was detected within the limits of detection when the wild-type AAV2 vector was used.

[0248] Taken together, these results demonstrate that AAV vectors that include an AAV capsid polypeptide (e.g., an AAV2 capsid polypeptide) having an amino acid sequence set forth in Table 1C or according to Formula A based on such a set forth sequence can have the ability to deliver nucleic acid to and express nucleic acid in retinal cells in at least two different retinal regions.

### Example 6—Treating a Retinal Condition Using an AAV Vector

[0249] An AAV vector is constructed to include an AAV2 capsid polypeptide having an amino acid sequence set forth in Table 1C (e.g., SEQ ID NO:C2) or according to Formula A based on such a set forth sequence and an exogenous nucleic acid sequence encoding a therapeutic polypeptide. The constructed AAV vector is administered intravitreally to a human identified as having a retinal condition in an amount that is from about 1×10⁷ to about 1×10¹⁴ AAV vectors. After the administration, the severity of one or more symptoms of the retinal condition is reduced and/or the progression of the retinal condition is slowed.

### Example 7—Construction of AAV Vectors Containing Mutated Capsid Polypeptides

[0250] A high-throughput method was used to create AAV vectors with mutated capsid polypeptides and to screen those created AAV vectors for particular AAV vectors having the ability to exhibit high efficiency and/or specificity for infecting retinal cells of the parafovea region of the eye. See, e.g., Öztürk et al., bioRxiv, 2020.10.01.323196 (2020). Briefly, highly complex libraries of AAV mutants were created and injected into the eyes of primates (cynolmolgus macaques or rhesus macaques). These libraries were created such that each AAV vector in the library contained a unique DNA barcode, which allowed for tracking of a mutated AAV capsid polypeptide. In one library version, successfully packaged AAV vectors were polymerase chain reaction (PCR) amplified and repackaged, resulting in a “repack” library. In another library version, AAV vectors were injected into primate retinas, and nucleic acid encoding the AAV capsid polypeptides were then amplified from the nuclei of foveal cells, resulting in an “enriched” library. Each iteration of the AAV library (e.g., the original library, the repack library, and the enriched library) was injected intravitreally into primate eyes.

[0251] After injection, the AAV vectors competed with each other in vivo. Infection of successful AAV vectors led to expression of the DNA barcodes. Single cell suspensions were created from isolated retinal tissue, and single cell microfluidic technology (10X Genomics) was used to create cDNA libraries of individual cells. Computational analysis was performed to identify optimal vectors, according to cell specificities, expression levels, and/or other desirable characteristics, based on the presence and quantity of DNA barcodes in transcriptomes from thousands of different cells of multiple cell types in parallel. The performance of AAV capsid polypeptides was evaluated on the basis of mRNA transcription levels rather than the presence of DNA, reflecting the ability of the AAV vectors to drive expression of the AAV vector nucleic acid as opposed to simply having the ability to enter a cell.

[0252] AAV vectors having capsid polypeptides that included an amino acid sequence of any one of SEQ ID NOs:D2-D76 located between amino acid residues 587 and 588 of SEQ ID NO:1 or an amino acid sequence of any one of SEQ ID NOs:D77D78 as a replacement of amino acid residues 585 to 590 of SEQ ID NO:1 mediated expression in retinal cells of the parafovea region (Table 1D). The AAV vectors were ranked based on overall rankings with +++ indicating those that performed in the top ⅓ of vectors tested, with ++ indicating those that performed in middle ⅓ of vectors tested, and with + indicating those that performed in the bottom ⅓ of vectors tested. These were determined in terms of total levels of gene expression in the parafoveal region of the retina. No expression was detected within the limits of detection when the wild-type AAV2 vector was used.

[0253] Taken together, these results demonstrate that AAV vectors that include an AAV capsid polypeptide (e.g., an AAV2 capsid polypeptide) having an amino acid sequence set forth in Table 1D or according to Formula A based on such a set forth sequence can have the ability to mediate transgene expression in retinal cells of the parafovea region following intravitreal injection.

### Example 8—Treating a Retinal Condition Using an AAV Vector

[0254] An AAV vector is constructed to include an AAV2 capsid polypeptide having an amino acid sequence set forth in Table 1D (e.g., SEQ ID NO:D2) or according to Formula A based on such a set forth sequence and an exogenous nucleic acid sequence encoding a therapeutic polypeptide. The constructed AAV vector is administered intravitreally to a human identified as having a retinal condition in an amount that is from about 1×10¹⁴ to about 1×10¹⁴ AAV vectors. After the administration, the severity of one or more symptoms of the retinal condition is reduced and/or the progression of the retinal condition is slowed.

### Example 9—Construction of AAV Vectors Containing Mutated Capsid Polypeptides

[0255] A high-throughput method was used to create AAV vectors with mutated capsid polypeptides and to screen those created AAV vectors for particular AAV vectors having the ability to exhibit high efficiency and/or specificity for infecting retinal cells. See, e.g., Öztürk et al., bioRxiv, 2020.10.01.323196 (2020) and Öztürk et al., eLife, 10:e64175 (2021). Briefly, highly complex libraries of AAV mutants were created and injected into the eyes of primates (cynolmolgus macaques or rhesus macaques). These libraries were created such that each AAV vector in the library contained a unique DNA barcode, which allowed for tracking of a mutated AAV capsid polypeptide. In one library version, successfully packaged AAV vectors were polymerase chain reaction (PCR) amplified and repackaged, resulting in a “repack” library. In another library version, AAV vectors were injected into primate retinas, and nucleic acid encoding the AAV capsid polypeptides were then amplified from the nuclei of foveal cells, resulting in an “enriched” library. Each iteration of the AAV library (e.g., the original library, the repack library, and the enriched library) was injected intravitreally into primate eyes.

[0256] After injection, the AAV vectors competed with each other in vivo. Infection of successful AAV vectors led to expression of the DNA barcodes. Single cell suspensions were created from isolated retinal tissue, and single cell microfluidic technology (10X Genomics) was used to create cDNA libraries of individual cells. Computational analysis was performed to identify optimal vectors, according to cell specificities, expression levels, and/or other desirable characteristics, based on the presence and quantity of DNA barcodes in transcriptomes from thousands of different cells of multiple cell types in parallel. The performance of AAV capsid polypeptides was evaluated on the basis of mRNA transcription levels rather than the presence of DNA, reflecting the ability of the AAV vectors to drive expression of the AAV vector nucleic acid as opposed to simply having the ability to enter a cell.

[0257] AAV vectors having capsid polypeptides that included an amino acid sequence of any one of SEQ ID NOs:E2-E75 located between amino acid residues 587 and 588 of SEQ ID NO:1 or an amino acid sequence of any one of SEQ ID NOs:E76-E83 as a replacement of amino acid residues 585 to 590 of SEQ ID NO:1 mediated expression the ability to deliver nucleic acid to and express nucleic acid in multiple different retinal cells types within an eye, thereby providing an efficient way to obtain nucleic acid delivery to many different retinal cell types (Table 1E). The AAV vectors were ranked based on overall rankings with +++ indicating those that performed in the top ⅓ of vectors tested, with ++ indicating those that performed in middle ⅓ of vectors tested, and with + indicating those that performed in the bottom ⅓ of vectors tested. These were determined in terms of total levels of gene expression across cell types. No expression was detected within the limits of detection when the wild-type AAV2 vector was used.

[0258] Taken together, these results demonstrate that AAV vectors that include an AAV capsid polypeptide (e.g., an AAV2 capsid polypeptide) having an amino acid sequence set forth in Table 1E or according to Formula A based on such a set forth sequence can have the ability to mediate transgene expression in multiple different retinal cells types within an eye following intravitreal injection.

### Example 10—Treating a Retinal Condition Using an AAV Vector

[0259] An AAV vector is constructed to include an AAV2 capsid polypeptide having an amino acid sequence set forth in Table 1E (e.g., SEQ ID NO:E2) or according to Formula A based on such a set forth sequence and an exogenous nucleic acid sequence encoding a therapeutic polypeptide. The constructed AAV vector is administered intravitreally to a human identified as having a retinal condition in an amount that is from about 1×10⁷ to about 1×10¹⁴ AAV vectors. After the administration, the severity of one or more symptoms of the retinal condition is reduced and/or the progression of the retinal condition is slowed.

### Example 11—Construction of AAV Vectors Containing Mutated Capsid Polypeptides

[0260] A high-throughput method was used to create AAV vectors with mutated capsid polypeptides and to screen those created AAV vectors for particular AAV vectors having the ability to exhibit high efficiency and/or specificity for infecting retinal cells. See, e.g., Öztürk et al., bioRxiv, 2020.10.01.323196 (2020) and Öztürk et al., eLife, 10:e64175 (2021). Briefly, highly complex libraries of AAV mutants were created and injected into the eyes of primates (cynolmolgus macaques or rhesus macaques). These libraries were created such that each AAV vector in the library contained a unique DNA barcode, which allowed for tracking of a mutated AAV capsid polypeptide. In one library version, successfully packaged AAV vectors were polymerase chain reaction (PCR) amplified and repackaged, resulting in a “repack” library. In another library version, AAV vectors were injected into primate retinas, and nucleic acid encoding the AAV capsid polypeptides were then amplified from the nuclei of foveal cells, resulting in an “enriched” library. Each iteration of the AAV library (e.g., the original library, the repack library, and the enriched library) was injected intravitreally into primate eyes.

[0261] After injection, the AAV vectors competed with each other in vivo. Infection of successful AAV vectors led to expression of the DNA barcodes. Single cell suspensions were created from isolated retinal tissue, and single cell microfluidic technology (10X Genomics) was used to create cDNA libraries of individual cells. Computational analysis was performed to identify optimal vectors, according to cell specificities, expression levels, and/or other desirable characteristics, based on the presence and quantity of DNA barcodes in transcriptomes from thousands of different cells of multiple cell types in parallel. The performance of AAV capsid polypeptides was evaluated on the basis of mRNA transcription levels rather than the presence of DNA, reflecting the ability of the AAV vectors to drive expression of the AAV vector nucleic acid as opposed to simply having the ability to enter a cell.

[0262] AAV vectors having capsid polypeptides that included an amino acid sequence of any one of SEQ ID NOs:F2-F10 located between amino acid residues 587 and 588 of SEQ ID NO:1 mediated expression in RPE cells (Table 1F). The AAV vectors were ranked based on overall rankings with +++ indicating those that performed in the top ⅓ of vectors tested, with ++ indicating those that performed in middle ⅓ of vectors tested, and with + indicating those that performed in the bottom ⅓ of vectors tested. These were determined in terms of total levels of gene expression in RPE cells. No expression was detected within the limits of detection when the wild-type AAV2 vector was used.

[0263] Taken together, these results demonstrate that AAV vectors that include an AAV capsid polypeptide (e.g., an AAV2 capsid polypeptide) having an amino acid sequence set forth in Table 1F or according to Formula A based on such a set forth sequence can have the ability to mediate transgene expression in RPE cells following intravitreal injection.

### Example 12—Treating a Retinal Condition Using an AAV Vector

[0264] An AAV vector is constructed to include an AAV2 capsid polypeptide having an amino acid sequence set forth in Table 1F (e.g., SEQ ID NO:F2) or according to Formula A based on such a set forth sequence and an exogenous nucleic acid sequence encoding a therapeutic polypeptide. The constructed AAV vector is administered intravitreally to a human identified as having a retinal condition in an amount that is from about 1×10⁷ to about 1×10¹⁴ AAV vectors. After the administration, the severity of one or more symptoms of the retinal condition is reduced and/or the progression of the retinal condition is slowed.

### Example 13—Construction of AAV Vectors Containing Mutated Capsid Polypeptides

[0265] A high-throughput method was used to create AAV vectors with mutated capsid polypeptides and to screen those created AAV vectors for particular AAV vectors having the ability to exhibit high efficiency and/or specificity for infecting retinal cells. See, e.g., Öztürk et al., bioRxiv, 2020.10.01.323196 (2020) and Öztürk et al., eLife, 10:e64175 (2021). Briefly, highly complex libraries of AAV mutants were created and injected into the eyes of primates (cynolmolgus macaques or rhesus macaques). These libraries were created such that each AAV vector in the library contained a unique DNA barcode, which allowed for tracking of a mutated AAV capsid polypeptide. In one library version, successfully packaged AAV vectors were polymerase chain reaction (PCR) amplified and repackaged, resulting in a “repack” library. In another library version, AAV vectors were injected into primate retinas, and nucleic acid encoding the AAV capsid polypeptides were then amplified from the nuclei of foveal cells, resulting in an “enriched” library. Each iteration of the AAV library (e.g., the original library, the repack library, and the enriched library) was injected intravitreally into primate eyes.

[0266] After injection, the AAV vectors competed with each other in vivo. Infection of successful AAV vectors led to expression of the DNA barcodes. Single cell suspensions were created from isolated retinal tissue, and single cell microfluidic technology (10X Genomics) was used to create cDNA libraries of individual cells. Computational analysis was performed to identify optimal vectors, according to cell specificities, expression levels, and/or other desirable characteristics, based on the presence and quantity of DNA barcodes in transcriptomes from thousands of different cells of multiple cell types in parallel. The performance of AAV capsid polypeptides was evaluated on the basis of mRNA transcription levels rather than the presence of DNA, reflecting the ability of the AAV vectors to drive expression of the AAV vector nucleic acid as opposed to simply having the ability to enter a cell.

[0267] AAV vectors having capsid polypeptides that included an amino acid sequence of any one of SEQ ID NOs:G2-G70 located between amino acid residues 587 and 588 of SEQ ID NO:1 or an amino acid sequence of any one of SEQ ID NOs:G71-G77 as a replacement of amino acid residues 585 to 590 of SEQ ID NO:1 mediated expression preferentially in photoreceptor cells (Table 1G). The AAV vectors were ranked based on overall rankings with +++ indicating those that performed in the top ⅓ of vectors tested, with ++ indicating those that performed in middle ⅓ of vectors tested, and with + indicating those that performed in the bottom ⅓ of vectors tested. These were determined in terms of total levels of gene expression in retinal cells. No expression was detected within the limits of detection when the wild-type AAV2 vector was used.

[0268] Taken together, these results demonstrate that AAV vectors that include an AAV capsid polypeptide (e.g., an AAV2 capsid polypeptide) having an amino acid sequence set forth in Table 1G or according to Formula A based on such a set forth sequence can have the ability to mediate transgene expression preferentially in photoreceptor cells following intravitreal injection.

### Example 14—Treating a Retinal Condition Using an AAV Vector

[0269] An AAV vector is constructed to include an AAV2 capsid polypeptide having an amino acid sequence set forth in Table 1G (e.g., SEQ ID NO:G2) or according to Formula Abased on such a set forth sequence and an exogenous nucleic acid sequence encoding a therapeutic polypeptide. The constructed AAV vector is administered intravitreally to a human identified as having a retinal condition in an amount that is from about 1×10⁷ to about 1×10¹⁴ AAV vectors. After the administration, the severity of one or more symptoms of the retinal condition is reduced and/or the progression of the retinal condition is slowed.

### Example 15—Construction of AAV Vectors Containing Mutated Capsid Polypeptides

[0270] A high-throughput method was used to create AAV vectors with mutated capsid polypeptides and to screen those created AAV vectors for particular AAV vectors having the ability to exhibit high efficiency and/or specificity for infecting retinal cells. See, e.g., Öztürk et al., bioRxiv, 2020.10.01.323196 (2020) and Öztürk et al., eLife, 10:e64175 (2021). Briefly, highly complex libraries of AAV mutants were created and injected into the eyes of primates (cynolmolgus macaques or rhesus macaques). These libraries were created such that each AAV vector in the library contained a unique DNA barcode, which allowed for tracking of a mutated AAV capsid polypeptide. In one library version, successfully packaged AAV vectors were polymerase chain reaction (PCR) amplified and repackaged, resulting in a “repack” library. In another library version, AAV vectors were injected into primate retinas, and nucleic acid encoding the AAV capsid polypeptides were then amplified from the nuclei of foveal cells, resulting in an “enriched” library. Each iteration of the AAV library (e.g., the original library, the repack library, and the enriched library) was injected intravitreally into primate eyes.

[0271] After injection, the AAV vectors competed with each other in vivo. Infection of successful AAV vectors led to expression of the DNA barcodes. Single cell suspensions were created from isolated retinal tissue, and single cell microfluidic technology (10X Genomics) was used to create cDNA libraries of individual cells. Computational analysis was performed to identify optimal vectors, according to cell specificities, expression levels, and/or other desirable characteristics, based on the presence and quantity of DNA barcodes in transcriptomes from thousands of different cells of multiple cell types in parallel. The performance of AAV capsid polypeptides was evaluated on the basis of mRNA transcription levels rather than the presence of DNA, reflecting the ability of the AAV vectors to drive expression of the AAV vector nucleic acid as opposed to simply having the ability to enter a cell.

[0272] AAV vectors having capsid polypeptides that included an amino acid sequence of any one of SEQ ID NOs:H2-H243 located between amino acid residues 587 and 588 of SEQ ID NO:1 or an amino acid sequence of any one of SEQ ID NOs:H244-H258 as a replacement of amino acid residues 585 to 590 of SEQ ID NO:1 mediated expression preferentially in retinal ganglion cells (Table 1H). The AAV vectors were ranked based on overall rankings with +++ indicating those that performed in the top ⅓ of vectors tested, with ++ indicating those that performed in middle ⅓ of vectors tested, and with + indicating those that performed in the bottom ⅓ of vectors tested. These were determined in terms of total levels of gene expression in retinal cells. No expression was detected within the limits of detection when the wild-type AAV2 vector was used.

[0273] Taken together, these results demonstrate that AAV vectors that include an AAV capsid polypeptide (e.g., an AAV2 capsid polypeptide) having an amino acid sequence set forth in Table 1H or according to Formula A based on such a set forth sequence can have the ability to mediate transgene expression preferentially in retinal ganglion cells following intravitreal injection.

### Example 16—Treating a Retinal Condition Using an AAV Vector

[0274] An AAV vector is constructed to include an AAV2 capsid polypeptide having an amino acid sequence set forth in Table 1H (e.g., SEQ ID NO:H2) or according to Formula Abased on such a set forth sequence and an exogenous nucleic acid sequence encoding a therapeutic polypeptide. The constructed AAV vector is administered intravitreally to a human identified as having a retinal condition in an amount that is from about 1×10⁷ to about 1×10¹⁴ AAV vectors. After the administration, the severity of one or more symptoms of the retinal condition is reduced and/or the progression of the retinal condition is slowed.

### Example 17—Construction of AAV Vectors Containing Mutated Capsid Polypeptides

[0275] A high-throughput method was used to create AAV vectors with mutated capsid polypeptides and to screen those created AAV vectors for particular AAV vectors having the ability to exhibit high efficiency and/or specificity for infecting retinal cells. See, e.g., Öztürk et al., bioRxiv, 2020.10.01.323196 (2020) and Öztürk et al., eLife, 10:e64175 (2021). Briefly, highly complex libraries of AAV mutants were created and injected into the eyes of primates (cynolmolgus macaques or rhesus macaques). These libraries were created such that each AAV vector in the library contained a unique DNA barcode, which allowed for tracking of a mutated AAV capsid polypeptide. In one library version, successfully packaged AAV vectors were polymerase chain reaction (PCR) amplified and repackaged, resulting in a “repack” library. In another library version, AAV vectors were injected into primate retinas, and nucleic acid encoding the AAV capsid polypeptides were then amplified from the nuclei of foveal cells, resulting in an “enriched” library. Each iteration of the AAV library (e.g., the original library, the repack library, and the enriched library) was injected intravitreally into primate eyes.

[0276] After injection, the AAV vectors competed with each other in vivo. Infection of successful AAV vectors led to expression of the DNA barcodes. Single cell suspensions were created from isolated retinal tissue, and single cell microfluidic technology (10X Genomics) was used to create cDNA libraries of individual cells. Computational analysis was performed to identify optimal vectors, according to cell specificities, expression levels, and/or other desirable characteristics, based on the presence and quantity of DNA barcodes in transcriptomes from thousands of different cells of multiple cell types in parallel. The performance of AAV capsid polypeptides was evaluated on the basis of mRNA transcription levels rather than the presence of DNA, reflecting the ability of the AAV vectors to drive expression of the AAV vector nucleic acid as opposed to simply having the ability to enter a cell.

[0277] AAV vectors having capsid polypeptides that included an amino acid sequence of any one of SEQ ID NOs:I2-I67 located between amino acid residues 587 and 588 of SEQ ID NO:1 or an amino acid sequence of any one of SEQ ID NOs:I68-I74 as a replacement of amino acid residues 585 to 590 of SEQ ID NO:1 mediated expression preferentially in bipolar cells (Table 1I). The AAV vectors were ranked based on overall rankings with +++ indicating those that performed in the top ⅓ of vectors tested, with ++ indicating those that performed in middle ⅓ of vectors tested, and with + indicating those that performed in the bottom ⅓ of vectors tested. These were determined in terms of total levels of gene expression in retinal cells. No expression was detected within the limits of detection when the wild-type AAV2 vector was used.

[0278] Taken together, these results demonstrate that AAV vectors that include an AAV capsid polypeptide (e.g., an AAV2 capsid polypeptide) having an amino acid sequence set forth in Table 1I or according to Formula A based on such a set forth sequence can have the ability to mediate transgene expression preferentially in bipolar cells following intravitreal injection.

### Example 18—Treating a Retinal Condition Using an AAV Vector

[0279] An AAV vector is constructed to include an AAV2 capsid polypeptide having an amino acid sequence set forth in Table 1I (e.g., SEQ ID NO:I2) or according to Formula A based on such a set forth sequence and an exogenous nucleic acid sequence encoding a therapeutic polypeptide. The constructed AAV vector is administered intravitreally to a human identified as having a retinal condition in an amount that is from about 1×10⁷ to about 1×10¹⁴ AAV vectors. After the administration, the severity of one or more symptoms of the retinal condition is reduced and/or the progression of the retinal condition is slowed.

### Example 19—Construction of AAV Vectors Containing Mutated Capsid Polypeptides

[0280] A high-throughput method was used to create AAV vectors with mutated capsid polypeptides and to screen those created AAV vectors for particular AAV vectors having the ability to exhibit high efficiency and/or specificity for infecting retinal cells. See, e.g., Öztürk et al., bioRxiv, 2020.10.01.323196 (2020) and Öztürk et al., eLife, 10:e64175 (2021). Briefly, highly complex libraries of AAV mutants were created and injected into the eyes of primates (cynolmolgus macaques or rhesus macaques). These libraries were created such that each AAV vector in the library contained a unique DNA barcode, which allowed for tracking of a mutated AAV capsid polypeptide. In one library version, successfully packaged AAV vectors were polymerase chain reaction (PCR) amplified and repackaged, resulting in a “repack” library. In another library version, AAV vectors were injected into primate retinas, and nucleic acid encoding the AAV capsid polypeptides were then amplified from the nuclei of foveal cells, resulting in an “enriched” library. Each iteration of the AAV library (e.g., the original library, the repack library, and the enriched library) was injected intravitreally into primate eyes.

[0281] After injection, the AAV vectors competed with each other in vivo. Infection of successful AAV vectors led to expression of the DNA barcodes. Single cell suspensions were created from isolated retinal tissue, and single cell microfluidic technology (10X Genomics) was used to create cDNA libraries of individual cells. Computational analysis was performed to identify optimal vectors, according to cell specificities, expression levels, and/or other desirable characteristics, based on the presence and quantity of DNA barcodes in transcriptomes from thousands of different cells of multiple cell types in parallel. The performance of AAV capsid polypeptides was evaluated on the basis of mRNA transcription levels rather than the presence of DNA, reflecting the ability of the AAV vectors to drive expression of the AAV vector nucleic acid as opposed to simply having the ability to enter a cell.

[0282] AAV vectors having capsid polypeptides that included an amino acid sequence of any one of SEQ ID NOs:J2-J61 located between amino acid residues 587 and 588 of SEQ ID NO:1 or an amino acid sequence of any one of SEQ ID NOs:J62-J64 as a replacement of amino acid residues 585 to 590 of SEQ ID NO:1 mediated expression preferentially in ON-retinal ganglion cells (Table 1J). The AAV vectors were ranked based on overall rankings with +++ indicating those that performed in the top ⅓ of vectors tested, with ++ indicating those that performed in middle ⅓ of vectors tested, and with + indicating those that performed in the bottom ⅓ of vectors tested. These were determined in terms of total levels of gene expression in retinal cells. No expression was detected within the limits of detection when the wild-type AAV2 vector was used.

[0283] Taken together, these results demonstrate that AAV vectors that include an AAV capsid polypeptide (e.g., an AAV2 capsid polypeptide) having an amino acid sequence set forth in Table 1J or according to Formula A based on such a set forth sequence can have the ability to mediate transgene expression preferentially in ON-retinal ganglion cells following intravitreal injection.

### Example 20—Treating a Retinal Condition Using an AAV Vector

[0284] An AAV vector is constructed to include an AAV2 capsid polypeptide having an amino acid sequence set forth in Table 1J (e.g., SEQ ID NO:J2) or according to Formula A based on such a set forth sequence and an exogenous nucleic acid sequence encoding a therapeutic polypeptide. The constructed AAV vector is administered intravitreally to a human identified as having a retinal condition in an amount that is from about 1×10⁷ to about 1×10¹⁴ AAV vectors. After the administration, the severity of one or more symptoms of the retinal condition is reduced and/or the progression of the retinal condition is slowed.

### Example 21—Construction of AAV Vectors Containing Mutated Capsid Polypeptides

[0285] A high-throughput method was used to create AAV vectors with mutated capsid polypeptides and to screen those created AAV vectors for particular AAV vectors having the ability to exhibit high efficiency and/or specificity for infecting retinal cells. See, e.g., Öztürk et al., bioRxiv, 2020.10.01.323196 (2020) and Öztürk et al., eLife, 10:e64175 (2021). Briefly, highly complex libraries of AAV mutants were created and injected into the eyes of primates (cynolmolgus macaques or rhesus macaques). These libraries were created such that each AAV vector in the library contained a unique DNA barcode, which allowed for tracking of a mutated AAV capsid polypeptide. In one library version, successfully packaged AAV vectors were polymerase chain reaction (PCR) amplified and repackaged, resulting in a “repack” library. In another library version, AAV vectors were injected into primate retinas, and nucleic acid encoding the AAV capsid polypeptides were then amplified from the nuclei of foveal cells, resulting in an “enriched” library. Each iteration of the AAV library (e.g., the original library, the repack library, and the enriched library) was injected intravitreally into primate eyes.

[0286] After injection, the AAV vectors competed with each other in vivo. Infection of successful AAV vectors led to expression of the DNA barcodes. Single cell suspensions were created from isolated retinal tissue, and single cell microfluidic technology (10X Genomics) was used to create cDNA libraries of individual cells. Computational analysis was performed to identify optimal vectors, according to cell specificities, expression levels, and/or other desirable characteristics, based on the presence and quantity of DNA barcodes in transcriptomes from thousands of different cells of multiple cell types in parallel. The performance of AAV capsid polypeptides was evaluated on the basis of mRNA transcription levels rather than the presence of DNA, reflecting the ability of the AAV vectors to drive expression of the AAV vector nucleic acid as opposed to simply having the ability to enter a cell.

[0287] AAV vectors having capsid polypeptides that included an amino acid sequence of any one of SEQ ID NOs:K2-K60 located between amino acid residues 587 and 588 of SEQ ID NO:1 or an amino acid sequence of any one of SEQ ID NOs:K61-K63 as a replacement of amino acid residues 585 to 590 of SEQ ID NO:1 mediated expression preferentially in OFF-retinal ganglion cells (Table 1K). The AAV vectors were ranked based on overall rankings with +++ indicating those that performed in the top ⅓ of vectors tested, with ++ indicating those that performed in middle ⅓ of vectors tested, and with + indicating those that performed in the bottom ⅓ of vectors tested. These were determined in terms of total levels of gene expression in retinal cells. No expression was detected within the limits of detection when the wild-type AAV2 vector was used.

[0288] Taken together, these results demonstrate that AAV vectors that include an AAV capsid polypeptide (e.g., an AAV2 capsid polypeptide) having an amino acid sequence set forth in Table 1K or according to Formula A based on such a set forth sequence can have the ability to mediate transgene expression preferentially in OFF-retinal ganglion cells following intravitreal injection.

### Example 22—Treating a Retinal Condition Using an AAV Vector

[0289] An AAV vector is constructed to include an AAV2 capsid polypeptide having an amino acid sequence set forth in Table 1K (e.g., SEQ ID NO:K2) or according to Formula A based on such a set forth sequence and an exogenous nucleic acid sequence encoding a therapeutic polypeptide. The constructed AAV vector is administered intravitreally to a human identified as having a retinal condition in an amount that is from about 1×10¹⁴ to about 1×10¹⁴ AAV vectors. After the administration, the severity of one or more symptoms of the retinal condition is reduced and/or the progression of the retinal condition is slowed.

### Example 23—Construction of AAV Vectors Containing Mutated Capsid Polypeptides

[0290] A high-throughput method was used to create AAV vectors with mutated capsid polypeptides and to screen those created AAV vectors for particular AAV vectors having the ability to exhibit high efficiency and/or specificity for infecting retinal cells. See, e.g., Öztürk et al., bioRxiv, 2020.10.01.323196 (2020) and Öztürk et al., eLife, 10:e64175 (2021). Briefly, highly complex libraries of AAV mutants were created and injected into the eyes of primates (cynolmolgus macaques or rhesus macaques). These libraries were created such that each AAV vector in the library contained a unique DNA barcode, which allowed for tracking of a mutated AAV capsid polypeptide. In one library version, successfully packaged AAV vectors were polymerase chain reaction (PCR) amplified and repackaged, resulting in a “repack” library.

[0291] The performance of AAV capsid polypeptides for packaging was evaluated on the basis of successful packaging in the original and the “repack” library, reflecting the ability of the AAV vectors to package.

[0292] AAV vectors having capsid polypeptides that included an amino acid sequence of any one of SEQ ID NOs:L2-L19 located between amino acid residues 587 and 588 of SEQ ID NO:1 or an amino acid sequence of any one of SEQ ID NOs:L20-L27 as a replacement of amino acid residues 585 to 590 of SEQ ID NO:1 mediated efficient packaging (Table 1L). The AAV vectors were ranked based on overall rankings with +++ indicating those that performed in the top ⅓ of vectors tested, with ++ indicating those that performed in middle ⅓ of vectors tested, and with + indicating those that performed in the bottom ⅓ of vectors tested.

[0293] Taken together, these results demonstrate that AAV vectors that include an AAV capsid polypeptide (e.g., an AAV2 capsid polypeptide) having an amino acid sequence set forth in Table 1L or according to Formula A based on such a set forth sequence can have the ability to mediate efficient packaging.

### Example 24—Treating a Retinal Condition Using an AAV Vector

[0294] An AAV vector is constructed to include an AAV2 capsid polypeptide having an amino acid sequence set forth in Table 1L (e.g., SEQ ID NO:L2) or according to Formula A based on such a set forth sequence and an exogenous nucleic acid sequence encoding a therapeutic polypeptide. The constructed AAV vector is administered intravitreally to a human identified as having a retinal condition in an amount that is from about 1×10⁷ to about 1×10¹⁴ AAV vectors. After the administration, the severity of one or more symptoms of the retinal condition is reduced and/or the progression of the retinal condition is slowed.

### Example 25—Additional Embodiments

[0295] Embodiment 1A. An adeno-associated virus (AAV) vector comprising an AAV capsid polypeptide, wherein said capsid polypeptide comprises the amino acid sequence of any one of SEQ ID NOs:A2-A19.

[0296] Embodiment 2A. The vector of Embodiment 1A, wherein said capsid polypeptide comprises the amino acid sequence of SEQ ID NO:1 except that said amino acid sequence of any one of SEQ ID NOs:A2-A19 is located between amino acid positions 587 and 588 of SEQ ID NO:1.

[0297] Embodiment 3A. The vector of Embodiment 1A, wherein said capsid polypeptide comprises the amino acid sequence of SEQ ID NO:1 except that said amino acid sequence of any one of SEQ ID NOs:A2-A18 is located between amino acid positions 587 and 588 of SEQ ID NO:1.

[0298] Embodiment 4A. The vector of Embodiment 1A, wherein said capsid polypeptide comprises the amino acid sequence of SEQ ID NO:1 except that the amino acids from position 585 to 590 of SEQ ID NO:1 are replaced with said amino acid sequence of any one of SEQ ID NOs:A2-A19.

[0299] Embodiment 5A. The vector of Embodiment 1A, wherein said capsid polypeptide comprises the amino acid sequence of SEQ ID NO:1 except that the amino acids from position 585 to 590 of SEQ ID NO:1 are replaced with said amino acid sequence of SEQ ID NO:A19.

[0300] Embodiment 6A. The vector of any one of Embodiments 1A-5A, wherein said vector is an AAV2 vector.

[0301] Embodiment 7A. The vector of any one of Embodiments 1A-6A, wherein said vector infects greater than 50 percent of foveal cones when a titer of at least 1×10⁷ of said vector is administered intravitreally to an eye of a human (or a non-human primate).

[0302] Embodiment 8A. The vector of any one of Embodiments 1A-7A, wherein said vector comprises an exogenous nucleic acid encoding an RNA or a polypeptide.

[0303] Embodiment 9A. The vector of Embodiment 8A, wherein said exogenous nucleic acid encodes an RNA.

[0304] Embodiment 10A. The vector of Embodiment 9A, wherein said RNA is an siRNA or microRNA.

[0305] Embodiment 11A. The vector of Embodiment 8A, wherein said exogenous nucleic acid encodes a polypeptide.

[0306] Embodiment 12A. The vector of Embodiment 11A, wherein said polypeptide is an ABCA4 polypeptide, a CRB1 polypeptide, an NPHP5 polypeptide, or an NR2E3 polypeptide.

[0307] Embodiment 13A. The vector of any one of Embodiments 1A-12A, wherein said vector expresses more nucleic acid in foveal cones than the level of expression from a comparable AAV vector comprising a capsid polypeptide consisting of the amino acid sequence set forth in SEQ ID NO:1.

[0308] Embodiment 14A. An AAV capsid polypeptide comprising the amino acid sequence of any one of SEQ ID NOs:A2-A19.

[0309] Embodiment 15A. The polypeptide of Embodiment 14A, wherein said polypeptide comprises the amino acid sequence of SEQ ID NO:1 except that said amino acid sequence of any one of SEQ ID NOs:A2-A19 is located between amino acid positions 587 and 588 of SEQ ID NO:1.

[0310] Embodiment 16A. The polypeptide of Embodiment 14A, wherein said polypeptide comprises the amino acid sequence of SEQ ID NO:1 except that said amino acid sequence of any one of SEQ ID NOs:A2-A18 is located between amino acid positions 587 and 588 of SEQ ID NO:1.

[0311] Embodiment 17A. The polypeptide of Embodiment 14A, wherein said polypeptide comprises the amino acid sequence of SEQ ID NO:1 except that the amino acids from position 585 to 590 of SEQ ID NO:1 are replaced with said amino acid sequence of any one of SEQ ID NOs:A2-A19.

[0312] Embodiment 18A. The polypeptide of Embodiment 14A, wherein said polypeptide comprises the amino acid sequence of SEQ ID NO:1 except that the amino acids from position 585 to 590 of SEQ ID NO:1 are replaced with said amino acid sequence of SEQ ID NO:A19.

[0313] Embodiment 19A. The polypeptide of any one of Embodiments 14A-18A, wherein an AAV vector comprising said polypeptide infects greater than 50 percent of foveal cones when a titer of at least 1×10⁷ of said vector is administered intravitreally to an eye of a human (or a non-human primate).

[0314] Embodiment 20A. The polypeptide of any one of Embodiments 14A-19A, wherein an AAV vector comprising said polypeptide expresses more nucleic acid in foveal cones than the level of expression from a comparable AAV vector comprising a capsid polypeptide consisting of the amino acid sequence set forth in SEQ ID NO:1.

[0315] Embodiment 21A. A nucleic acid molecule encoding a vector of any one of Embodiments 1A-13A or a polypeptide of any one of Embodiments 14A-20A.

[0316] Embodiment 22A. The nucleic acid molecule of Embodiment 21A, wherein said nucleic acid molecule is DNA.

[0317] Embodiment 23A. A host cell comprising a nucleic acid molecule of any one of Embodiments 21A-22A.

[0318] Embodiment 24A. The host cell of Embodiment 23A, wherein said host cell expresses said vector.

[0319] Embodiment 25A. The host cell of Embodiment 23A, wherein said host cell expresses said polypeptide.

[0320] Embodiment 26A. A host cell comprising a vector of any one of Embodiments 1A-13A or a polypeptide of any one of Embodiments 14A-20A.

[0321] Embodiment 27A. The host cell of any one of Embodiments 23A-26A, wherein said host cell is a retinal cell.

[0322] Embodiment 28A. A composition comprising a vector of any one of Embodiments 1A-13A.

[0323] Embodiment 29A. The composition of Embodiment 28A, wherein said composition comprises from about 1×10⁷ to about 1×10¹⁴ of said vector.

[0324] Embodiment 30A. The composition of any one of Embodiments 28A-29A, wherein said composition comprises phosphate buffered saline, Hank's Balanced Salt Solution, or Pluronic F68.

[0325] Embodiment 31A. A method for delivering an exogenous nucleic acid sequence to a foveal cone within a mammal, wherein said method comprises contacting said foveal cone with an AAV vector comprising an AAV capsid polypeptide and said exogenous nucleic acid sequence, wherein said capsid polypeptide comprises the amino acid sequence of any one of SEQ ID NOs:A2-A19, wherein said AAV vector infects said foveal cone, thereby delivering said exogenous nucleic acid sequence to said foveal cone.

[0326] Embodiment 32A. The method of Embodiment 31A, wherein said capsid polypeptide comprises the amino acid sequence of SEQ ID NO:1 except that said amino acid sequence of any one of SEQ ID NOs:A2-A19 is located between amino acid positions 587 and 588 of SEQ ID NO:1.

[0327] Embodiment 33A. The method of Embodiment 31A, wherein said capsid polypeptide comprises the amino acid sequence of SEQ ID NO:1 except that said amino acid sequence of any one of SEQ ID NOs:A2-A18 is located between amino acid positions 587 and 588 of SEQ ID NO:1.

[0328] Embodiment 34A. The method of Embodiment A31, wherein said capsid polypeptide comprises the amino acid sequence of SEQ ID NO:1 except that the amino acids from position 585 to 590 of SEQ ID NO:1 are replaced with said amino acid sequence of any one of SEQ ID NOs:A2-A19.

[0329] Embodiment 35A. The method of Embodiment 31A, wherein said capsid polypeptide comprises the amino acid sequence of SEQ ID NO:1 except that the amino acids from position 585 to 590 of SEQ ID NO:1 are replaced with said amino acid sequence of SEQ ID NO:A19.

[0330] Embodiment 36A. The method of any one of Embodiments 31A-35A, wherein said mammal is a human.

[0331] Embodiment 37A. The method of any one of Embodiments 31A-36A, wherein said vector is an AAV2 vector.

[0332] Embodiment 38A. The method of any one of Embodiments 31A-37A, wherein said vector infects greater than 50 percent of foveal cones when a titer of at least 1×10⁷ of said vector is administered intravitreally to an eye of a human (or a non-human primate).

[0333] Embodiment 39A. The method of any one of Embodiments 31A-38A, wherein said exogenous nucleic acid sequence encodes an RNA or a polypeptide.

[0334] Embodiment 40A. The method of Embodiment 39A, wherein said exogenous nucleic acid encodes an RNA.

[0335] Embodiment 41A. The method of Embodiment 40A, wherein said RNA is an siRNA or microRNA.

[0336] Embodiment 42A. The method of Embodiment 39A, wherein said exogenous nucleic acid encodes a polypeptide.

[0337] Embodiment 43A. The method of Embodiment 42A, wherein said polypeptide is an ABCA4 polypeptide, a CRB1 polypeptide, an NPHP5 polypeptide, or an NR2E3 polypeptide.

[0338] Embodiment 44A. The method of any one of Embodiments 31A-43A, wherein said vector expresses more of said exogenous nucleic acid sequence in said foveal cone than the level of expression in a foveal cone from a comparable AAV vector comprising a capsid polypeptide consisting of the amino acid sequence set forth in SEQ ID NO:1.

[0339] Embodiment 45A. The method of any one of Embodiments 31A-44A, wherein said method comprises intravitreally administering a composition comprising said vector to said mammal, thereby contacting said foveal cone with said vector.

[0340] Embodiment 46A. The method of Embodiment 45A, wherein said composition comprises from about 1×10⁷ to about 1×10⁴ of said vector.

[0341] Embodiment 47A. A method for treating a retinal condition, wherein said method comprises contacting foveal cones of a mammal having said retinal condition with AAV vectors comprising an AAV capsid polypeptide and an exogenous nucleic acid sequence, wherein said capsid polypeptide comprises the amino acid sequence of any one of SEQ ID NOs:A2-A19, wherein said AAV vectors infect said foveal cones and drive expression of said exogenous nucleic acid sequence within said foveal cones, thereby treating said retinal condition.

[0342] Embodiment 48A. The method of Embodiment 47A, wherein said mammal is a human.

[0343] Embodiment 49A. The method of any one of Embodiments 47A-48A, wherein said retinal condition is selected from the group consisting of cone dystrophy, cone/rod dystrophy, retinitis pigmentosa, macular degeneration, achromatopsia, blue cone monochromcy, and color blindness.

[0344] Embodiment 50A. The method of any one of Embodiments 47A-49A, wherein said capsid polypeptide comprises the amino acid sequence of SEQ ID NO:1 except that said amino acid sequence of any one of SEQ ID NOs:A2-A19 is located between amino acid positions 587 and 588 of SEQ ID NO:1.

[0345] Embodiment 51A. The method of any one of Embodiments 47A-49A, wherein said capsid polypeptide comprises the amino acid sequence of SEQ ID NO:1 except that said amino acid sequence of any one of SEQ ID NOs:A2-A18 is located between amino acid positions 587 and 588 of SEQ ID NO:1.

[0346] Embodiment 52A. The method of any one of Embodiments 47A-49A, wherein said capsid polypeptide comprises the amino acid sequence of SEQ ID NO:1 except that the amino acids from position 585 to 590 of SEQ ID NO:1 are replaced with said amino acid sequence of any one of SEQ ID NOs:A2-A19.

[0347] Embodiment 53A. The method of any one of Embodiments 47A-49A, wherein said capsid polypeptide comprises the amino acid sequence of SEQ ID NO:1 except that the amino acids from position 585 to 590 of SEQ ID NO:1 are replaced with said amino acid sequence of SEQ ID NO:A19.

[0348] Embodiment 54A. The method of any one of Embodiments 47A-53A, wherein said vectors are AAV2 vectors.

[0349] Embodiment 55A. The method of any one of Embodiments 47A-54A, wherein said vectors infect greater than 50 percent of foveal cones when a titer of at least 1×10⁷ of said vectors is administered intravitreally to an eye of said mammal.

[0350] Embodiment 56A. The method of any one of Embodiments 47A-55A, wherein said exogenous nucleic acid sequence encodes an RNA.

[0351] Embodiment 57A. The method of Embodiment 56A, wherein said RNA is an siRNA or a microRNA.

[0352] Embodiment 58A. The method of any one of Embodiments 47A-55A, wherein said exogenous nucleic acid encodes a polypeptide.

[0353] Embodiment 59A. The method of Embodiment 58A, wherein said polypeptide is an ABCA4 polypeptide, a CRB1 polypeptide, an NPHP5 polypeptide, and an NR2E3 polypeptide.

[0354] Embodiment 60A. The method of any one of Embodiments 47A-59A, wherein said vectors express more of said exogenous nucleic acid sequence in said foveal cones than the level of expression in foveal cones from a comparable AAV vector comprising a capsid polypeptide consisting of the amino acid sequence set forth in SEQ ID NO:1.

[0355] Embodiment 61A. The method of any one of Embodiments 47A-60A, wherein said method comprises intravitreally administering a composition comprising said vectors to said mammal, thereby contacting said foveal cones with said vectors.

[0356] Embodiment 62A. The method of Embodiment 61A, wherein said composition comprises from about 1×10⁷ to about 1×10¹⁴ of said vectors.

[0357] Embodiment 1B. An adeno-associated virus (AAV) vector comprising an AAV capsid polypeptide, wherein said capsid polypeptide comprises the amino acid sequence of any one of SEQ ID NOs:B2-B317.

[0358] Embodiment 2B. The vector of Embodiment 1B, wherein said capsid polypeptide comprises the amino acid sequence of SEQ ID NO:1 except that said amino acid sequence of any one of SEQ ID NOs:B2-B317 is located between amino acid positions 587 and 588 of SEQ ID NO:1.

[0359] Embodiment 3B. The vector of Embodiment 1B, wherein said capsid polypeptide comprises the amino acid sequence of SEQ ID NO:1 except that said amino acid sequence of any one of SEQ ID NOs:B2-B298 is located between amino acid positions 587 and 588 of SEQ ID NO:1.

[0360] Embodiment 4B. The vector of Embodiment 1B, wherein said capsid polypeptide comprises the amino acid sequence of SEQ ID NO:1 except that the amino acids from position 585 to 590 of SEQ ID NO:1 are replaced with said amino acid sequence of any one of SEQ ID NOs:B2-B317.

[0361] Embodiment 5B. The vector of Embodiment 1B, wherein said capsid polypeptide comprises the amino acid sequence of SEQ ID NO:1 except that the amino acids from position 585 to 590 of SEQ ID NO:1 are replaced with said amino acid sequence of any one of SEQ ID NOs:B299-B317.

[0362] Embodiment 6B. The vector of any one of Embodiments 1B-5B, wherein said vector is an AAV2 vector.

[0363] Embodiment 7B. The vector of any one of Embodiments 1B-6B, wherein said vector infects greater than 2.5 percent of retinal cells when a titer of at least 1×10⁷ of said vector is administered intravitreally to an eye of a human (or a non-human primate).

[0364] Embodiment 8B. The vector of any one of Embodiments 1B-7B, wherein said vector comprises an exogenous nucleic acid encoding an RNA or a polypeptide.

[0365] Embodiment 9B. The vector of Embodiment 8B, wherein said exogenous nucleic acid encodes an RNA.

[0366] Embodiment 10B. The vector of Embodiment 9B, wherein said RNA is an siRNA or microRNA.

[0367] Embodiment 11B. The vector of Embodiment 8B, wherein said exogenous nucleic acid encodes a polypeptide.

[0368] Embodiment 12B. The vector of Embodiment 11B, wherein said polypeptide is an ABCA4 polypeptide, a CRB1 polypeptide, an NPHP5 polypeptide, or an NR2E3 polypeptide.

[0369] Embodiment 13B. The vector of any one of Embodiments 1B-12B, wherein said vector expresses more nucleic acid in retinal cells than the level of expression from a comparable AAV vector comprising a capsid polypeptide consisting of the amino acid sequence set forth in SEQ ID NO:1.

[0370] Embodiment 14B. An AAV capsid polypeptide comprising the amino acid sequence of any one of SEQ ID NOs:B2-B317.

[0371] Embodiment 15B. The polypeptide of Embodiment 14B, wherein said polypeptide comprises the amino acid sequence of SEQ ID NO:1 except that said amino acid sequence of any one of SEQ ID NOs:B2-B317 is located between amino acid positions 587 and 588 of SEQ ID NO: 1.

[0372] Embodiment 16B. The polypeptide of Embodiment 14B, wherein said polypeptide comprises the amino acid sequence of SEQ ID NO:1 except that said amino acid sequence of any one of SEQ ID NOs:B2-B298 is located between amino acid positions 587 and 588 of SEQ ID NO:1.

[0373] Embodiment 17B. The polypeptide of Embodiment 14B, wherein said polypeptide comprises the amino acid sequence of SEQ ID NO:1 except that the amino acids from position 585 to 590 of SEQ ID NO:1 are replaced with said amino acid sequence of any one of SEQ ID NOs:B2-B317.

[0374] Embodiment 18B. The polypeptide of Embodiment 14B, wherein said polypeptide comprises the amino acid sequence of SEQ ID NO:1 except that the amino acids from position 585 to 590 of SEQ ID NO:1 are replaced with said amino acid sequence of any one of SEQ ID NOs:B299-B317.

[0375] Embodiment 19B. The polypeptide of any one of Embodiments 14B-18B, wherein an AAV vector comprising said polypeptide infects greater than 2.5 percent of retinal cells when a titer of at least 1×10⁷ of said vector is administered intravitreally to an eye of a human (or a non-human primate).

[0376] Embodiment 20B. The polypeptide of any one of Embodiments 14B-19B, wherein an AAV vector comprising said polypeptide expresses more nucleic acid in retinal cells than the level of expression from a comparable AAV vector comprising a capsid polypeptide consisting of the amino acid sequence set forth in SEQ ID NO:1.

[0377] Embodiment 21B. A nucleic acid molecule encoding a vector of any one of Embodiments 1B-13B or a polypeptide of any one of Embodiments 14B-20B.

[0378] Embodiment 22B. The nucleic acid molecule of Embodiment 21B, wherein said nucleic acid molecule is DNA.

[0379] Embodiment 23B. A host cell comprising a nucleic acid molecule of any one of Embodiments 21B-22B.

[0380] Embodiment 24B. The host cell of Embodiment 23B, wherein said host cell expresses said vector.

[0381] Embodiment 25B. The host cell of Embodiment 23B, wherein said host cell expresses said polypeptide.

[0382] Embodiment 26B. A host cell comprising a vector of any one of Embodiments 1B-13B or a polypeptide of any one of Embodiments 14B-20B.

[0383] Embodiment 27B. The host cell of any one of Embodiments 23B-26B, wherein said host cell is a retinal cell.

[0384] Embodiment 28B. A composition comprising a vector of any one of Embodiments 1B-13B.

[0385] Embodiment 29B. The composition of Embodiment 28B, wherein said composition comprises from about 1×10⁷ to about 1×10¹⁴ of said vector.

[0386] Embodiment 30B. The composition of any one of Embodiments 28B-29B, wherein said composition comprises phosphate buffered saline, Hank's Balanced Salt Solution, or Pluronic F68.

[0387] Embodiment 31B. A method for delivering an exogenous nucleic acid sequence to a retinal cell within a mammal, wherein said method comprises contacting said retinal cell with an AAV vector comprising an AAV capsid polypeptide and said exogenous nucleic acid sequence, wherein said capsid polypeptide comprises the amino acid sequence of any one of SEQ ID NOs:B2-B317, wherein said AAV vector infects said retinal cell, thereby delivering said exogenous nucleic acid sequence to said retinal cell.

[0388] Embodiment 32B. The method of Embodiment 31B, wherein said capsid polypeptide comprises the amino acid sequence of SEQ ID NO:1 except that said amino acid sequence of any one of SEQ ID NOs:B2-B317 is located between amino acid positions 587 and 588 of SEQ ID NO:1.

[0389] Embodiment 33B. The method of Embodiment 31B, wherein said capsid polypeptide comprises the amino acid sequence of SEQ ID NO:1 except that said amino acid sequence of any one of SEQ ID NOs:B2-B298 is located between amino acid positions 587 and 588 of SEQ ID NO:1.

[0390] Embodiment 34B. The method of Embodiment 31B, wherein said capsid polypeptide comprises the amino acid sequence of SEQ ID NO:1 except that the amino acids from position 585 to 590 of SEQ ID NO:1 are replaced with said amino acid sequence of any one of SEQ ID NOs:B2-B317.

[0391] Embodiment 35B. The method of Embodiment 31B, wherein said capsid polypeptide comprises the amino acid sequence of SEQ ID NO:1 except that the amino acids from position 585 to 590 of SEQ ID NO:1 are replaced with said amino acid sequence of any one of SEQ ID NOs:B299-B317.

[0392] Embodiment 36B. The method of any one of Embodiments 31B-35B, wherein said mammal is a human.

[0393] Embodiment 37B. The method of any one of Embodiments 31B-36B, wherein said vector is an AAV2 vector.

[0394] Embodiment 38B. The method of any one of Embodiments 31B-37B, wherein said vector infects greater than 2.5 percent of retinal cells when a titer of at least 1×10⁷ of said vector is administered intravitreally to an eye of a human (or a non-human primate).

[0395] Embodiment 39B. The method of any one of Embodiments 31B-38B, wherein said exogenous nucleic acid sequence encodes an RNA or a polypeptide.

[0396] Embodiment 40B. The method of Embodiment 39B, wherein said exogenous nucleic acid encodes an RNA.

[0397] Embodiment 41B. The method of Embodiment 40B, wherein said RNA is an siRNA or microRNA.

[0398] Embodiment 42B. The method of Embodiment 39B, wherein said exogenous nucleic acid encodes a polypeptide.

[0399] Embodiment 43B. The method of Embodiment 42B, wherein said polypeptide is an ABCA4 polypeptide, a CRB1 polypeptide, an NPHP5 polypeptide, or an NR2E3 polypeptide.

[0400] Embodiment 44B. The method of any one of Embodiments 31B-43B, wherein said vector expresses more of said exogenous nucleic acid sequence in said retinal cell than the level of expression in a retinal cell from a comparable AAV vector comprising a capsid polypeptide consisting of the amino acid sequence set forth in SEQ ID NO:1.

[0401] Embodiment 45B. The method of any one of Embodiments 31B-44B, wherein said method comprises intravitreally administering a composition comprising said vector to said mammal, thereby contacting said retinal cell with said vector.

[0402] Embodiment 46B. The method of Embodiment 45B, wherein said composition comprises from about 1×10⁷ to about 1×10¹⁴ of said vector.

[0403] Embodiment 47B. A method for treating a retinal condition, wherein said method comprises contacting retinal cells of a mammal having said retinal condition with AAV vectors comprising an AAV capsid polypeptide and an exogenous nucleic acid sequence, wherein said capsid polypeptide comprises the amino acid sequence of any one of SEQ ID NOs:B2-B317, wherein said AAV vectors infect said retinal cells and drive expression of said exogenous nucleic acid sequence within said retinal cells, thereby treating said retinal condition.

[0404] Embodiment 48B. The method of Embodiment 47B, wherein said mammal is a human.

[0405] Embodiment 49B. The method of any one of Embodiments 47B-48B, wherein said retinal condition is selected from the group consisting of LCA, OCA1, retinitis pigmentosa, rod/cone dystrophy, cone dystrophy, Stargardt Disease, Usher syndrome, XLRP, and XLRS.

[0406] Embodiment 50B. The method of any one of Embodiments 47B-49B, wherein said capsid polypeptide comprises the amino acid sequence of SEQ ID NO:1 except that said amino acid sequence of any one of SEQ ID NOs:B2-B317 is located between amino acid positions 587 and 588 of SEQ ID NO:1.

[0407] Embodiment 51B. The method of any one of Embodiments 47B-49B, wherein said capsid polypeptide comprises the amino acid sequence of SEQ ID NO:1 except that said amino acid sequence of any one of SEQ ID NOs:B2-B298 is located between amino acid positions 587 and 588 of SEQ ID NO:1.

[0408] Embodiment 52B. The method of any one of Embodiments 47B-49B, wherein said capsid polypeptide comprises the amino acid sequence of SEQ ID NO:1 except that the amino acids from position 585 to 590 of SEQ ID NO:1 are replaced with said amino acid sequence of any one of SEQ ID NOs:B2-B317.

[0409] Embodiment 53B. The method of any one of Embodiments 47B-49B, wherein said capsid polypeptide comprises the amino acid sequence of SEQ ID NO:1 except that the amino acids from position 585 to 590 of SEQ ID NO:1 are replaced with said amino acid sequence of any one of SEQ ID NOs:B299-B317.

[0410] Embodiment 54B. The method of any one of Embodiments 47B-53B, wherein said vectors are AAV2 vectors.

[0411] Embodiment 55B. The method of any one of Embodiments 47B-54B, wherein said vectors infect greater than 2.5 percent of retinal cells when a titer of at least 1×10⁷ of said vectors is administered intravitreally to an eye of said mammal.

[0412] Embodiment 56B. The method of any one of Embodiments 47B-55B, wherein said exogenous nucleic acid sequence encodes an RNA.

[0413] Embodiment 57B. The method of Embodiment 56B, wherein said RNA is an siRNA or a microRNA.

[0414] Embodiment 58B. The method of any one of Embodiments 47B-55B, wherein said exogenous nucleic acid encodes a polypeptide.

[0415] Embodiment 59B. The method of Embodiment 58B, wherein said polypeptide is an ABCA4 polypeptide, a CRB1 polypeptide, an NPHP5 polypeptide, and an NR2E3 polypeptide.

[0416] Embodiment 60B. The method of any one of Embodiments 47B-59B, wherein said vectors express more of said exogenous nucleic acid sequence in said retinal cells than the level of expression in retinal cells from a comparable AAV vector comprising a capsid polypeptide consisting of the amino acid sequence set forth in SEQ ID NO:1.

[0417] Embodiment 61B. The method of any one of Embodiments 47B-60B, wherein said method comprises intravitreally administering a composition comprising said vectors to said mammal, thereby contacting said retinal cells with said vectors.

[0418] Embodiment 62B. The method of Embodiment 61B, wherein said composition comprises from about 1×10⁷ to about 1×10⁴ of said vectors.

[0419] Embodiment 1C. An adeno-associated virus (AAV) vector comprising an AAV capsid polypeptide, wherein said capsid polypeptide comprises the amino acid sequence of any one of SEQ ID NOs:C2-C45.

[0420] Embodiment 2C. The vector of Embodiment 1C, wherein said capsid polypeptide comprises the amino acid sequence of SEQ ID NO:1 except that said amino acid sequence of any one of SEQ ID NOs:C2-C45 is located between amino acid positions 587 and 588 of SEQ ID NO:1.

[0421] Embodiment 3C. The vector of Embodiment 1C, wherein said capsid polypeptide comprises the amino acid sequence of SEQ ID NO:1 except that said amino acid sequence of any one of SEQ ID NOs:C2-C43 is located between amino acid positions 587 and 588 of SEQ ID NO:1.

[0422] Embodiment 4C. The vector of Embodiment 1C, wherein said capsid polypeptide comprises the amino acid sequence of SEQ ID NO:1 except that the amino acids from position 585 to 590 of SEQ ID NO:1 are replaced with said amino acid sequence of any one of SEQ ID NOs:C2-C45.

[0423] Embodiment 5C. The vector of Embodiment 1C, wherein said capsid polypeptide comprises the amino acid sequence of SEQ ID NO:1 except that the amino acids from position 585 to 590 of SEQ ID NO:1 are replaced with said amino acid sequence of any one of SEQ ID NOs:C44-C45.

[0424] Embodiment 6C. The vector of any one of Embodiments 1C-5C, wherein said vector is an AAV2 vector.

[0425] Embodiment 7C. The vector of any one of Embodiments 1C-6C, wherein said vector infects greater than 2 percent of retinal cells within two or more retinal regions when a titer of at least 1×10⁷ of said vector is administered intravitreally to an eye of a human (or a non-human primate).

[0426] Embodiment 8C. The vector of any one of Embodiments 1C-7C, wherein said vector comprises an exogenous nucleic acid encoding an RNA or a polypeptide.

[0427] Embodiment 9C. The vector of Embodiment 8C, wherein said exogenous nucleic acid encodes an RNA.

[0428] Embodiment 10C. The vector of Embodiment 9C, wherein said RNA is an siRNA or microRNA.

[0429] Embodiment 11C. The vector of Embodiment 8C, wherein said exogenous nucleic acid encodes a polypeptide.

[0430] Embodiment 12C. The vector of Embodiment 11C, wherein said polypeptide is an ABCA4 polypeptide, a CRB1 polypeptide, an NPHP5 polypeptide, or an NR2E3 polypeptide.

[0431] Embodiment 13C. The vector of any one of Embodiments 1C-12C, wherein said vector expresses more nucleic acid in retinal cells in at least two retinal regions than the level of expression from a comparable AAV vector comprising a capsid polypeptide consisting of the amino acid sequence set forth in SEQ ID NO:1, wherein said at least two retinal regions are selected from the group consisting of a fovea region, a parafovea region, a vascular arcade region, and a periphery region.

[0432] Embodiment 14C. An AAV capsid polypeptide comprising the amino acid sequence of any one of SEQ ID NOs:C2-C45.

[0433] Embodiment 15C. The polypeptide of Embodiment 14C, wherein said polypeptide comprises the amino acid sequence of SEQ ID NO:1 except that said amino acid sequence of any one of SEQ ID NOs:C2-C45 is located between amino acid positions 587 and 588 of SEQ ID NO:1.

[0434] Embodiment 16C. The polypeptide of Embodiment 14C, wherein said polypeptide comprises the amino acid sequence of SEQ ID NO:1 except that said amino acid sequence of any one of SEQ ID NOs:C2-C43 is located between amino acid positions 587 and 588 of SEQ ID NO:1.

[0435] Embodiment 17C. The polypeptide of Embodiment 14C, wherein said capsid polypeptide comprises the amino acid sequence of SEQ ID NO:1 except that the amino acids from position 585 to 590 of SEQ ID NO:1 are replaced with said amino acid sequence of any one of SEQ ID NOs:C2-C45.

[0436] Embodiment 18C. The polypeptide of Embodiment 14C, wherein said capsid polypeptide comprises the amino acid sequence of SEQ ID NO:1 except that the amino acids from position 585 to 590 of SEQ ID NO:1 are replaced with said amino acid sequence of any one of SEQ ID NOs:C44-C45.

[0437] Embodiment 19C. The polypeptide of any one of Embodiments 14C-18C, wherein an AAV vector comprising said polypeptide infects greater than 2 percent of retinal cells within two or more retinal regions when a titer of at least 1×10⁷ of said vector is administered intravitreally to an eye of a human (or a non-human primate).

[0438] Embodiment 20C. The polypeptide of any one of Embodiments 14C-19C, wherein an AAV vector comprising said polypeptide expresses more nucleic acid in retinal cells in at least two retinal regions than the level of expression from a comparable AAV vector comprising a capsid polypeptide consisting of the amino acid sequence set forth in SEQ ID NO:1, wherein said at least two retinal regions are selected from the group consisting of a fovea region, a parafovea region, a vascular arcade region, and a periphery region.

[0439] Embodiment 21C. A nucleic acid molecule encoding a vector of any one of Embodiments 1C-13C or a polypeptide of any one of Embodiments 14C-20C.

[0440] Embodiment 22C. The nucleic acid molecule of Embodiment 21C, wherein said nucleic acid molecule is DNA.

[0441] Embodiment 23C. A host cell comprising a nucleic acid molecule of any one of Embodiments 21C-22C.

[0442] Embodiment 24C. The host cell of Embodiment 23C, wherein said host cell expresses said vector.

[0443] Embodiment 25C. The host cell of Embodiment 23C, wherein said host cell expresses said polypeptide.

[0444] Embodiment 26C. A host cell comprising a vector of any one of Embodiments 1C-13C or a polypeptide of any one of Embodiments 14C-20C.

[0445] Embodiment 27C. The host cell of any one of Embodiments 23C-26C, wherein said host cell is a retinal cell.

[0446] Embodiment 28C. A composition comprising a vector of any one of Embodiments 1C-13C.

[0447] Embodiment 29C. The composition of Embodiment 28C, wherein said composition comprises from about 1×10⁷ to about 1×10¹⁴ of said vector.

[0448] Embodiment 30C. The composition of any one of Embodiments 28C-29C, wherein said composition comprises phosphate buffered saline, Hank's Balanced Salt Solution, or Pluronic F68.

[0449] Embodiment 31C. A method for delivering an exogenous nucleic acid sequence to retinal cells within at least two different retinal regions of an eye of a mammal, wherein said method comprises contacting said retinal cells with an AAV vector comprising an AAV capsid polypeptide and said exogenous nucleic acid sequence, wherein said capsid polypeptide comprises the amino acid sequence of any one of SEQ ID NOs:C2-C45, wherein said AAV vector infects retinal cells within said at least two different retinal regions, thereby delivering said exogenous nucleic acid sequence to said retinal cells, wherein said at least two retinal regions are selected from the group consisting of a fovea region, a parafovea region, a vascular arcade region, and a periphery region.

[0450] Embodiment 32C. The method of Embodiment 31C, wherein said capsid polypeptide comprises the amino acid sequence of SEQ ID NO:1 except that said amino acid sequence of any one of SEQ ID NOs:C2-C45 is located between amino acid positions 587 and 588 of SEQ ID NO:1.

[0451] Embodiment 33C. The method of Embodiment 31C, wherein said capsid polypeptide comprises the amino acid sequence of SEQ ID NO:1 except that said amino acid sequence of any one of SEQ ID NOs:C2-C43 is located between amino acid positions 587 and 588 of SEQ ID NO:1.

[0452] Embodiment 34C. The method of Embodiment 31C, wherein said capsid polypeptide comprises the amino acid sequence of SEQ ID NO:1 except that the amino acids from position 585 to 590 of SEQ ID NO:1 are replaced with said amino acid sequence of any one of SEQ ID NOs:C2-C45.

[0453] Embodiment 35C. The method of Embodiment 31C, wherein said capsid polypeptide comprises the amino acid sequence of SEQ ID NO:1 except that the amino acids from position 585 to 590 of SEQ ID NO:1 are replaced with said amino acid sequence of any one of SEQ ID NOs:C44-C45.

[0454] Embodiment 36C. The method of any one of Embodiments 31C-35C, wherein said mammal is a human.

[0455] Embodiment 37C. The method of any one of Embodiments 31C-36C, wherein said vector is an AAV2 vector.

[0456] Embodiment 38C. The method of any one of Embodiments 31C-37C, wherein said vector infects greater than 2 percent of retinal cells within said at least two retinal regions when a titer of at least 1×10⁷ of said vector is administered intravitreally to an eye of a human (or a non-human primate).

[0457] Embodiment 39C. The method of any one of Embodiments 31C-38C, wherein said exogenous nucleic acid sequence encodes an RNA or a polypeptide.

[0458] Embodiment 40C. The method of Embodiment 39C, wherein said exogenous nucleic acid encodes an RNA.

[0459] Embodiment 41C. The method of Embodiment 40C, wherein said RNA is an siRNA or microRNA.

[0460] Embodiment 42C. The method of Embodiment 39C, wherein said exogenous nucleic acid encodes a polypeptide.

[0461] Embodiment 43C. The method of Embodiment 42C, wherein said polypeptide is an ABCA4 polypeptide, a CRB1 polypeptide, an NPHP5 polypeptide, or an NR2E3 polypeptide.

[0462] Embodiment 44C. The method of any one of Embodiments 31C-43C, wherein said vector expresses more of said exogenous nucleic acid sequence in said retinal cells of said at least two retinal regions than the level of expression in a retinal cell from a comparable AAV vector comprising a capsid polypeptide consisting of the amino acid sequence set forth in SEQ ID NO:1.

[0463] Embodiment 45C. The method of any one of Embodiments 31C-44C, wherein said method comprises intravitreally administering a composition comprising said vector to said mammal, thereby contacting said retinal cells with said vector.

[0464] Embodiment 46C. The method of Embodiment 45C, wherein said composition comprises from about 1×10⁷ to about 1×10¹⁴ of said vector.

[0465] Embodiment 47C. A method for treating a retinal condition, wherein said method comprises contacting retinal cells of at least two retinal regions of an eye of a mammal having said retinal condition with AAV vectors comprising an AAV capsid polypeptide and an exogenous nucleic acid sequence, wherein said capsid polypeptide comprises the amino acid sequence of any one of SEQ ID NOs:C2-C45, wherein said AAV vectors infect said retinal cells of said at least two retinal regions and drive expression of said exogenous nucleic acid sequence within said retinal cells of said at least two retinal regions, thereby treating said retinal condition.

[0466] Embodiment 48C. The method of Embodiment 47C, wherein said mammal is a human.

[0467] Embodiment 49C. The method of any one of Embodiments 47C-48C, wherein said retinal condition is selected from the group consisting of LCA, OCA1, retinitis pigmentosa, rod/cone dystrophy, cone dystrophy, Stargardt Disease, Usher syndrome, XLRP, and XLRS.

[0468] Embodiment 50C. The method of any one of Embodiments 47C-49C, wherein said capsid polypeptide comprises the amino acid sequence of SEQ ID NO:1 except that said amino acid sequence of any one of SEQ ID NOs:C2-C45 is located between amino acid positions 587 and 588 of SEQ ID NO:1.

[0469] Embodiment 51C. The method of any one of Embodiments 47C-49C, wherein said capsid polypeptide comprises the amino acid sequence of SEQ ID NO:1 except that said amino acid sequence of any one of SEQ ID NOs:C2-C43 is located between amino acid positions 587 and 588 of SEQ ID NO:1.

[0470] Embodiment 52C. The method of any one of Embodiments 47C-49C, wherein said capsid polypeptide comprises the amino acid sequence of SEQ ID NO:1 except that the amino acids from position 585 to 590 of SEQ ID NO:1 are replaced with said amino acid sequence of any one of SEQ ID NOs:C2-C45.

[0471] Embodiment 53C. The method of any one of Embodiments 47C-49C, wherein said capsid polypeptide comprises the amino acid sequence of SEQ ID NO:1 except that the amino acids from position 585 to 590 of SEQ ID NO:1 are replaced with said amino acid sequence of any one of SEQ ID NOs:C44-C45.

[0472] Embodiment 54C. The method of any one of Embodiments 47C-53C, wherein said vectors are AAV2 vectors.

[0473] Embodiment 55C. The method of any one of Embodiments 47C-54C, wherein said vectors infect greater than 2 percent of retinal cells in said at least two retinal regions when a titer of at least 1×10¹⁴ of said vectors is administered intravitreally to an eye of said mammal.

[0474] Embodiment 56C. The method of any one of Embodiments 47C-55C, wherein said exogenous nucleic acid sequence encodes an RNA.

[0475] Embodiment 57C. The method of Embodiment 56C, wherein said RNA is an siRNA or a microRNA.

[0476] Embodiment 58C. The method of any one of Embodiments 47C-55C, wherein said exogenous nucleic acid encodes a polypeptide.

[0477] Embodiment 59C. The method of Embodiment 58C, wherein said polypeptide is an ABCA4 polypeptide, a CRB1 polypeptide, an NPHP5 polypeptide, and an NR2E3 polypeptide.

[0478] Embodiment 60C. The method of any one of Embodiments 47C-59C, wherein said vectors express more of said exogenous nucleic acid sequence in said retinal cells of said at least two retinal regions than the level of expression in retinal cells of said at least two retinal regions from a comparable AAV vector comprising a capsid polypeptide consisting of the amino acid sequence set forth in SEQ ID NO:1.

[0479] Embodiment 61C. The method of any one of Embodiments 47C-60C, wherein said method comprises intravitreally administering a composition comprising said vectors to said mammal, thereby contacting said retinal cells of said at least two retinal regions with said vectors.

[0480] Embodiment 62C. The method of Embodiment 61C, wherein said composition comprises from about 1×10⁷ to about 1×10¹⁴ of said vectors.

[0481] Embodiment 63C. The method of any one of Embodiments C47-C62, wherein said at least two retinal regions are selected from the group consisting of a fovea region, a parafovea region, a vascular arcade region, and a periphery region.

[0482] Embodiment 1D. An adeno-associated virus (AAV) vector comprising an AAV capsid polypeptide, wherein said capsid polypeptide comprises the amino acid sequence of any one of SEQ ID NOs:D2-D78.

[0483] Embodiment 2D. The vector of Embodiment 1D, wherein said capsid polypeptide comprises the amino acid sequence of SEQ ID NO:1 except that said amino acid sequence of any one of SEQ ID NOs:D2-D78 is located between amino acid positions 587 and 588 of SEQ ID NO:1.

[0484] Embodiment 3D. The vector of Embodiment 1D, wherein said capsid polypeptide comprises the amino acid sequence of SEQ ID NO:1 except that said amino acid sequence of any one of SEQ ID NOs:D2-D76 is located between amino acid positions 587 and 588 of SEQ ID NO:1.

[0485] Embodiment 4D. The vector of Embodiment 1D, wherein said capsid polypeptide comprises the amino acid sequence of SEQ ID NO:1 except that the amino acids from position 585 to 590 of SEQ ID NO:1 are replaced with said amino acid sequence of any one of SEQ ID NOs:D2-D78.

[0486] Embodiment 5D. The vector of Embodiment 1D, wherein said capsid polypeptide comprises the amino acid sequence of SEQ ID NO:1 except that the amino acids from position 585 to 590 of SEQ ID NO:1 are replaced with said amino acid sequence of any one of SEQ ID NOs:D77-D78.

[0487] Embodiment 6D. The vector of any one of Embodiments 1D-5D, wherein said vector is an AAV2 vector.

[0488] Embodiment 7D. The vector of any one of Embodiments 1D-6D, wherein said vector infects greater than 2 percent of retinal cells of a parafovea region of an eye when a titer of at least 1×10⁷ of said vector is administered intravitreally to an eye of a human (or a non-human primate).

[0489] Embodiment 8D. The vector of any one of Embodiments 1D-7D, wherein said vector comprises an exogenous nucleic acid encoding an RNA or a polypeptide.

[0490] Embodiment 9D. The vector of Embodiment 8D, wherein said exogenous nucleic acid encodes an RNA.

[0491] Embodiment 10D. The vector of Embodiment 9D, wherein said RNA is an siRNA or microRNA.

[0492] Embodiment 11D. The vector of Embodiment 8D, wherein said exogenous nucleic acid encodes a polypeptide.

[0493] Embodiment 12D. The vector of Embodiment 11D, wherein said polypeptide is an ABCA4 polypeptide, a CRB1 polypeptide, an NPHP5 polypeptide, or an NR2E3 polypeptide.

[0494] Embodiment 13D. The vector of any one of Embodiments 1D-12D, wherein said vector expresses more nucleic acid in retinal cells of a parafovea region of an eye than the level of expression from a comparable AAV vector comprising a capsid polypeptide consisting of the amino acid sequence set forth in SEQ ID NO:1.

[0495] Embodiment 14D. An AAV capsid polypeptide comprising the amino acid sequence of any one of SEQ ID NOs:D2-D78.

[0496] Embodiment 15D. The polypeptide of Embodiment 14D, wherein said polypeptide comprises the amino acid sequence of SEQ ID NO:1 except that said amino acid sequence of any one of SEQ ID NOs:D2-D78 is located between amino acid positions 587 and 588 of SEQ ID NO:1.

[0497] Embodiment 16D. The polypeptide of Embodiment 14D, wherein said polypeptide comprises the amino acid sequence of SEQ ID NO:1 except that said amino acid sequence of any one of SEQ ID NOs:D2-D76 is located between amino acid positions 587 and 588 of SEQ ID NO:1.

[0498] Embodiment 17D. The polypeptide of Embodiment 14D, wherein said polypeptide comprises the amino acid sequence of SEQ ID NO:1 except that the amino acids from position 585 to 590 of SEQ ID NO:1 are replaced with said amino acid sequence of any one of SEQ ID NOs:D2-D78.

[0499] Embodiment 18D. The polypeptide of Embodiment 14D, wherein said polypeptide comprises the amino acid sequence of SEQ ID NO:1 except that the amino acids from position 585 to 590 of SEQ ID NO:1 are replaced with said amino acid sequence of any one of SEQ ID NOs:D77-D78.

[0500] Embodiment 19D. The polypeptide of any one of Embodiments 14D-18D, wherein an AAV vector comprising said polypeptide infects greater than 2 percent of retinal cells of a parafovea region of an eye when a titer of at least 1×10⁷ of said vector is administered intravitreally to an eye of a human (or a non-human primate).

[0501] Embodiment 20D. The polypeptide of any one of Embodiments 14D-19D, wherein an AAV vector comprising said polypeptide expresses more nucleic acid in retinal cells of a parafovea region of an eye than the level of expression from a comparable AAV vector comprising a capsid polypeptide consisting of the amino acid sequence set forth in SEQ ID NO:1.

[0502] Embodiment 21D. A nucleic acid molecule encoding a vector of any one of Embodiments 1D-13D or a polypeptide of any one of Embodiments 14D-20D.

[0503] Embodiment 22D. The nucleic acid molecule of Embodiment 21D, wherein said nucleic acid molecule is DNA.

[0504] Embodiment 23D. A host cell comprising a nucleic acid molecule of any one of Embodiments 21D-22D.

[0505] Embodiment 24D. The host cell of Embodiment 23D, wherein said host cell expresses said vector.

[0506] Embodiment 25D. The host cell of Embodiment 23D, wherein said host cell expresses said polypeptide.

[0507] Embodiment 26D. A host cell comprising a vector of any one of Embodiments 1D-13D or a polypeptide of any one of Embodiments 14D-20D.

[0508] Embodiment 27D. The host cell of any one of Embodiments 23D-26D, wherein said host cell is a retinal cell.

[0509] Embodiment 28D. A composition comprising a vector of any one of Embodiments 1D-13D.

[0510] Embodiment 29D. The composition of Embodiment 28D, wherein said composition comprises from about 1×10⁷ to about 1×10¹⁴ of said vector.

[0511] Embodiment 30D. The composition of any one of Embodiments 28D-29D, wherein said composition comprises phosphate buffered saline, Hank's Balanced Salt Solution, or Pluronic F68.

[0512] Embodiment 31D. A method for delivering an exogenous nucleic acid sequence to retinal cells of a parafovea region of an eye within a mammal, wherein said method comprises contacting said retinal cells with an AAV vector comprising an AAV capsid polypeptide and said exogenous nucleic acid sequence, wherein said capsid polypeptide comprises the amino acid sequence of any one of SEQ ID NOs:D2-D78, wherein said AAV vector infects said retinal cells, thereby delivering said exogenous nucleic acid sequence to said retinal cells.

[0513] Embodiment 32D. The method of Embodiment 31D, wherein said capsid polypeptide comprises the amino acid sequence of SEQ ID NO:1 except that said amino acid sequence of any one of SEQ ID NOs:D2-D78 is located between amino acid positions 587 and 588 of SEQ ID NO:1.

[0514] Embodiment 33D. The method of Embodiment 31D, wherein said capsid polypeptide comprises the amino acid sequence of SEQ ID NO:1 except that said amino acid sequence of any one of SEQ ID NOs:D2-D76 is located between amino acid positions 587 and 588 of SEQ ID NO:1.

[0515] Embodiment 34D. The method of Embodiment 31D, wherein said capsid polypeptide comprises the amino acid sequence of SEQ ID NO:1 except that the amino acids from position 585 to 590 of SEQ ID NO:1 are replaced with said amino acid sequence of any one of SEQ ID NOs:D2-D78.

[0516] Embodiment 35D. The method of Embodiment 31D, wherein said capsid polypeptide comprises the amino acid sequence of SEQ ID NO:1 except that the amino acids from position 585 to 590 of SEQ ID NO:1 are replaced with said amino acid sequence of any one of SEQ ID NOs:D77-D78.

[0517] Embodiment 36D. The method of any one of Embodiments 31D-35D, wherein said mammal is a human.

[0518] Embodiment 37D. The method of any one of Embodiments 31D-36D, wherein said vector is an AAV2 vector.

[0519] Embodiment 38D. The method of any one of Embodiments 31D-37D, wherein said vector infects greater than 2 percent of retinal cells of said parafovea region of said eye when a titer of at least 1×10¹⁴ of said vector is administered intravitreally.

[0520] Embodiment 39D. The method of any one of Embodiments 31D-38D, wherein said exogenous nucleic acid sequence encodes an RNA or a polypeptide.

[0521] Embodiment 40D. The method of Embodiment 39D, wherein said exogenous nucleic acid encodes an RNA.

[0522] Embodiment 41D. The method of Embodiment 40D, wherein said RNA is an siRNA or microRNA.

[0523] Embodiment 42D. The method of Embodiment 39D, wherein said exogenous nucleic acid encodes a polypeptide.

[0524] Embodiment 43D. The method of Embodiment 42D, wherein said polypeptide is an ABCA4 polypeptide, a CRB1 polypeptide, an NPHP5 polypeptide, or an NR2E3 polypeptide.

[0525] Embodiment 44D. The method of any one of Embodiments 31D-43D, wherein said vector expresses more of said exogenous nucleic acid sequence in said retinal cells than the level of expression in retinal cells of a parafovea region of an eye from a comparable AAV vector comprising a capsid polypeptide consisting of the amino acid sequence set forth in SEQ ID NO:1.

[0526] Embodiment 45D. The method of any one of Embodiments 31D-44D, wherein said method comprises intravitreally administering a composition comprising said vector to said mammal, thereby contacting said retinal cells of said parafovea region with said vector.

[0527] Embodiment 46D. The method of Embodiment 45D, wherein said composition comprises from about 1×10⁷ to about 1×10⁴ of said vector.

[0528] Embodiment 47D. A method for treating a retinal condition, wherein said method comprises contacting retinal cells of a parafovea region of an eye of a mammal having said retinal condition with AAV vectors comprising an AAV capsid polypeptide and an exogenous nucleic acid sequence, wherein said capsid polypeptide comprises the amino acid sequence of any one of SEQ ID NOs:D2-D78, wherein said AAV vectors infect said retinal cells and drive expression of said exogenous nucleic acid sequence within said retinal cells, thereby treating said retinal condition.

[0529] Embodiment 48D. The method of Embodiment 47D, wherein said mammal is a human.

[0530] Embodiment 49D. The method of any one of Embodiments 47D-48D, wherein said retinal condition is selected from the group consisting of cone dystrophy, cone/rod dystrophy, retinitis pigmentosa, macular degeneration, achromatopsia, blue cone monochromcy, and color blindness.

[0531] Embodiment 50D. The method of any one of Embodiments 47D-49D, wherein said capsid polypeptide comprises the amino acid sequence of SEQ ID NO:1 except that said amino acid sequence of any one of SEQ ID NOs:D2-D78 is located between amino acid positions 587 and 588 of SEQ ID NO:1.

[0532] Embodiment 51D. The method of any one of Embodiments 47D-49D, wherein said capsid polypeptide comprises the amino acid sequence of SEQ ID NO:1 except that said amino acid sequence of any one of SEQ ID NOs:D2-D76 is located between amino acid positions 587 and 588 of SEQ ID NO:1.

[0533] Embodiment 52D. The method of any one of Embodiments 47D-49D, wherein said capsid polypeptide comprises the amino acid sequence of SEQ ID NO:1 except that the amino acids from position 585 to 590 of SEQ ID NO:1 are replaced with said amino acid sequence of any one of SEQ ID NOs:D2-D78.

[0534] Embodiment 53D. The method of any one of Embodiments 47D-49D, wherein said capsid polypeptide comprises the amino acid sequence of SEQ ID NO:1 except that the amino acids from position 585 to 590 of SEQ ID NO:1 are replaced with said amino acid sequence of any one of SEQ ID NOs:D77-D78.

[0535] Embodiment 54D. The method of any one of Embodiments 47D-53D, wherein said vectors are AAV2 vectors.

[0536] Embodiment 55D. The method of any one of Embodiments 47D-54D, wherein said vectors infect greater than 2 percent of retinal cells of said parafovea region when a titer of at least 1×10⁷ of said vectors is administered intravitreally.

[0537] Embodiment 56D. The method of any one of Embodiments 47D-55D, wherein said exogenous nucleic acid sequence encodes an RNA.

[0538] Embodiment 57D. The method of Embodiment 56D, wherein said RNA is an siRNA or a microRNA.

[0539] Embodiment 58D. The method of any one of Embodiments 47D-55D, wherein said exogenous nucleic acid encodes a polypeptide.

[0540] Embodiment 59D. The method of Embodiment 58D, wherein said polypeptide is an ABCA4 polypeptide, a CRB1 polypeptide, an NPHP5 polypeptide, and an NR2E3 polypeptide.

[0541] Embodiment 60D. The method of any one of Embodiments 47D-59D, wherein said vectors express more of said exogenous nucleic acid sequence in said retinal cells of said parafovea region than the level of expression in retinal cells of a parafovea region from a comparable AAV vector comprising a capsid polypeptide consisting of the amino acid sequence set forth in SEQ ID NO:1.

[0542] Embodiment 61D. The method of any one of Embodiments 47D-60D, wherein said method comprises intravitreally administering a composition comprising said vectors to said mammal, thereby contacting said retinal cells of said parafovea region with said vectors.

[0543] Embodiment 62D. The method of Embodiment 61D, wherein said composition comprises from about 1×10⁷ to about 1×10¹⁴ of said vectors.

[0544] Embodiment 1E. An adeno-associated virus (AAV) vector comprising an AAV capsid polypeptide, wherein said capsid polypeptide comprises the amino acid sequence of any one of SEQ ID NOs:E2-E83.

[0545] Embodiment 2E. The vector of Embodiment 1E, wherein said capsid polypeptide comprises the amino acid sequence of SEQ ID NO:1 except that said amino acid sequence of any one of SEQ ID NOs:E2-E83 is located between amino acid positions 587 and 588 of SEQ ID NO:1.

[0546] Embodiment 3E. The vector of Embodiment 1E, wherein said capsid polypeptide comprises the amino acid sequence of SEQ ID NO:1 except that said amino acid sequence of any one of SEQ ID NOs:E2-E75 is located between amino acid positions 587 and 588 of SEQ ID NO:1.

[0547] Embodiment 4E. The vector of Embodiment 1E, wherein said capsid polypeptide comprises the amino acid sequence of SEQ ID NO:1 except that the amino acids from position 585 to 590 of SEQ ID NO:1 are replaced with said amino acid sequence of any one of SEQ ID NOs:E2-E83.

[0548] Embodiment 5E. The vector of Embodiment 1E, wherein said capsid polypeptide comprises the amino acid sequence of SEQ ID NO:1 except that the amino acids from position 585 to 590 of SEQ ID NO:1 are replaced with said amino acid sequence of any one of SEQ ID NOs:E76-E83.

[0549] Embodiment 6E. The vector of any one of Embodiments 1E-5E, wherein said vector is an AAV2 vector.

[0550] Embodiment 7E. The vector of any one of Embodiments 1E-6E, wherein said vector infects at least three different retinal cell types when a titer of at least 1×10⁷ of said vector is administered intravitreally to an eye of a human (or a non-human primate), wherein said at least three different retinal cell types are selected from the group consisting of retinal ganglion cells, amacrine cells, horizontal cells, bipolar cells, Muller glia cells, photoreceptor cells, and RPE cells.

[0551] Embodiment 8E. The vector of any one of Embodiments 1E-7E, wherein said vector comprises an exogenous nucleic acid encoding an RNA or a polypeptide.

[0552] Embodiment 9E. The vector of Embodiment 8E, wherein said exogenous nucleic acid encodes an RNA.

[0553] Embodiment 10E. The vector of Embodiment 9E, wherein said RNA is an siRNA or microRNA.

[0554] Embodiment 11E. The vector of Embodiment 8E, wherein said exogenous nucleic acid encodes a polypeptide.

[0555] Embodiment 12E. The vector of Embodiment 11E, wherein said polypeptide is an ABCA4 polypeptide, a CRB1 polypeptide, an NPHP5 polypeptide, or an NR2E3 polypeptide.

[0556] Embodiment 13E. The vector of any one of Embodiments 1E-12E, wherein said vector expresses more nucleic acid in at least three different retinal cell types than the level of expression from a comparable AAV vector comprising a capsid polypeptide consisting of the amino acid sequence set forth in SEQ ID NO:1, wherein said at least three different retinal cell types are selected from the group consisting of retinal ganglion cells, amacrine cells, horizontal cells, bipolar cells, Muller glia cells, photoreceptor cells, and RPE cells.

[0557] Embodiment 14E. An AAV capsid polypeptide comprising the amino acid sequence of any one of SEQ ID NOs:E2-E83.

[0558] Embodiment 15E. The polypeptide of Embodiment 14E, wherein said polypeptide comprises the amino acid sequence of SEQ ID NO:1 except that said amino acid sequence of any one of SEQ ID NOs:E2-E83 is located between amino acid positions 587 and 588 of SEQ ID NO:1.

[0559] Embodiment 16E. The polypeptide of Embodiment 14E, wherein said polypeptide comprises the amino acid sequence of SEQ ID NO:1 except that said amino acid sequence of any one of SEQ ID NOs:E2-E75 is located between amino acid positions 587 and 588 of SEQ ID NO:1.

[0560] Embodiment 17E. The polypeptide of Embodiment 14E, wherein said polypeptide comprises the amino acid sequence of SEQ ID NO:1 except that the amino acids from position 585 to 590 of SEQ ID NO:1 are replaced with said amino acid sequence of any one of SEQ ID NOs:E2-E83.

[0561] Embodiment 18E. The polypeptide of Embodiment 14E, wherein said polypeptide comprises the amino acid sequence of SEQ ID NO:1 except that the amino acids from position 585 to 590 of SEQ ID NO:1 are replaced with said amino acid sequence of any one of SEQ ID NOs:E76-E83.

[0562] Embodiment 19E. The polypeptide of any one of Embodiments 14E-18E, wherein an AAV vector comprising said polypeptide infects at least three different retinal cell types when a titer of at least 1×10⁷ of said vector is administered intravitreally to an eye of a human (or a non-human primate), wherein said at least three different retinal cell types are selected from the group consisting of retinal ganglion cells, amacrine cells, horizontal cells, bipolar cells, Muller glia cells, photoreceptor cells, and RPE cells.

[0563] Embodiment 20E. The polypeptide of any one of Embodiments 14E-19E, wherein an AAV vector comprising said polypeptide expresses more nucleic acid in at least three different retinal cell types than the level of expression from a comparable AAV vector comprising a capsid polypeptide consisting of the amino acid sequence set forth in SEQ ID NO:1, wherein said at least three different retinal cell types are selected from the group consisting of retinal ganglion cells, amacrine cells, horizontal cells, bipolar cells, Muller glia cells, photoreceptor cells, and RPE cells.

[0564] Embodiment 21E. A nucleic acid molecule encoding a vector of any one of Embodiments 1E-13E or a polypeptide of any one of Embodiments 14E-20E.

[0565] Embodiment 22E. The nucleic acid molecule of Embodiment 21E, wherein said nucleic acid molecule is DNA.

[0566] Embodiment 23E. A host cell comprising a nucleic acid molecule of any one of Embodiments 21E-22E.

[0567] Embodiment 24E. The host cell of Embodiment 23E, wherein said host cell expresses said vector.

[0568] Embodiment 25E. The host cell of Embodiment 23E, wherein said host cell expresses said polypeptide.

[0569] Embodiment 26E. A host cell comprising a vector of any one of Embodiments 1E-13E or a polypeptide of any one of Embodiments 14E-20E.

[0570] Embodiment 27E. The host cell of any one of Embodiments 23E-26E, wherein said host cell is a retinal cell.

[0571] Embodiment 28E. A composition comprising a vector of any one of Embodiments 1E-13E.

[0572] Embodiment 29E. The composition of Embodiment 28E, wherein said composition comprises from about 1×10⁷ to about 1×10¹⁴ of said vector.

[0573] Embodiment 30E. The composition of any one of Embodiments 28E-29E, wherein said composition comprises phosphate buffered saline, Hank's Balanced Salt Solution, or Pluronic E68.

[0574] Embodiment 31E. A method for delivering an exogenous nucleic acid sequence to at least three different retinal cell types of an eye of a mammal, wherein said method comprises contacting said at least three different retinal cell types with an AAV vector comprising an AAV capsid polypeptide and said exogenous nucleic acid sequence, wherein said capsid polypeptide comprises the amino acid sequence of any one of SEQ ID NOs:E2-E83, wherein said AAV vector infects said at least three different retinal cell types, thereby delivering said exogenous nucleic acid sequence to said at least three different retinal cell types, wherein said at least three different retinal cell types are selected from the group consisting of retinal ganglion cells, amacrine cells, horizontal cells, bipolar cells, Muller glia cells, photoreceptor cells, and RPE cells.

[0575] Embodiment 32E. The method of Embodiment 31E, wherein said capsid polypeptide comprises the amino acid sequence of SEQ ID NO:1 except that said amino acid sequence of any one of SEQ ID NOs:E2-E83 is located between amino acid positions 587 and 588 of SEQ ID NO:1.

[0576] Embodiment 33E. The method of Embodiment 31E, wherein said capsid polypeptide comprises the amino acid sequence of SEQ ID NO:1 except that said amino acid sequence of any one of SEQ ID NOs:E2-E75 is located between amino acid positions 587 and 588 of SEQ ID NO:1.

[0577] Embodiment 34E. The method of Embodiment 31E, wherein said capsid polypeptide comprises the amino acid sequence of SEQ ID NO:1 except that the amino acids from position 585 to 590 of SEQ ID NO:1 are replaced with said amino acid sequence of any one of SEQ ID NOs:E2-E83.

[0578] Embodiment 35E. The method of Embodiment 31E, wherein said capsid polypeptide comprises the amino acid sequence of SEQ ID NO:1 except that the amino acids from position 585 to 590 of SEQ ID NO:1 are replaced with said amino acid sequence of any one of SEQ ID NOs:E76-E83.

[0579] Embodiment 36E. The method of any one of Embodiments 31E-35E, wherein said mammal is a human.

[0580] Embodiment 37E. The method of any one of Embodiments 31E-36E, wherein said vector is an AAV2 vector.

[0581] Embodiment 38E. The method of any one of Embodiments 31E-37E, wherein said vector infects greater than 2 percent of said at least three different retinal cell types within an eye when a titer of at least 1×10⁷ of said vector is administered intravitreally to said eye.

[0582] Embodiment 39E. The method of any one of Embodiments 31E-38E, wherein said exogenous nucleic acid sequence encodes an RNA or a polypeptide.

[0583] Embodiment 40E. The method of Embodiment 39E, wherein said exogenous nucleic acid encodes an RNA.

[0584] Embodiment 41E. The method of Embodiment 40E, wherein said RNA is an siRNA or microRNA.

[0585] Embodiment 42E. The method of Embodiment 39E, wherein said exogenous nucleic acid encodes a polypeptide.

[0586] Embodiment 43E. The method of Embodiment 42E, wherein said polypeptide is an ABCA4 polypeptide, a CRB1 polypeptide, an NPHP5 polypeptide, or an NR2E3 polypeptide.

[0587] Embodiment 44E. The method of any one of Embodiments 31E-43E, wherein said vector expresses more of said exogenous nucleic acid sequence in said at least three different retinal cell types than the level of expression in said at least three different retinal cell types from a comparable AAV vector comprising a capsid polypeptide consisting of the amino acid sequence set forth in SEQ ID NO:1.

[0588] Embodiment 45E. The method of any one of Embodiments 31E-44E, wherein said method comprises intravitreally administering a composition comprising said vector to said mammal, thereby contacting said at least three different retinal cell types with said vector.

[0589] Embodiment 46E. The method of Embodiment 45E, wherein said composition comprises from about 1×10⁷ to about 1×10¹⁴ of said vector.

[0590] Embodiment 47E. A method for treating a retinal condition, wherein said method comprises contacting at least three different retinal cell types of an eye of a mammal having said retinal condition with AAV vectors comprising an AAV capsid polypeptide and an exogenous nucleic acid sequence, wherein said capsid polypeptide comprises the amino acid sequence of any one of SEQ ID NOs:E2-E83, wherein said AAV vectors infect said at least three different retinal cell types and drive expression of said exogenous nucleic acid sequence within said at least three different retinal cell types, thereby treating said retinal condition.

[0591] Embodiment 48E. The method of Embodiment 47E, wherein said mammal is a human.

[0592] Embodiment 49E. The method of any one of Embodiments 47E-48E, wherein said retinal condition is selected from the group consisting of cone dystrophy, cone/rod dystrophy, retinitis pigmentosa, macular degeneration, achromatopsia, blue cone monochromcy, and color blindness.

[0593] Embodiment 50E. The method of any one of Embodiments 47E-49E, wherein said capsid polypeptide comprises the amino acid sequence of SEQ ID NO:1 except that said amino acid sequence of any one of SEQ ID NOs:E2-E83 is located between amino acid positions 587 and 588 of SEQ ID NO:1.

[0594] Embodiment 51E. The method of any one of Embodiments 47E-49E, wherein said capsid polypeptide comprises the amino acid sequence of SEQ ID NO:1 except that said amino acid sequence of any one of SEQ ID NOs:E2-E75 is located between amino acid positions 587 and 588 of SEQ ID NO:1.

[0595] Embodiment 52E. The method of any one of Embodiments 47E-49E, wherein said capsid polypeptide comprises the amino acid sequence of SEQ ID NO:1 except that the amino acids from position 585 to 590 of SEQ ID NO:1 are replaced with said amino acid sequence of any one of SEQ ID NOs:E2-E83.

[0596] Embodiment 53E. The method of any one of Embodiments 47E-49E, wherein said capsid polypeptide comprises the amino acid sequence of SEQ ID NO:1 except that the amino acids from position 585 to 590 of SEQ ID NO:1 are replaced with said amino acid sequence of any one of SEQ ID NOs:E76-E83.

[0597] Embodiment 54E. The method of any one of Embodiments 47E-53E, wherein said vectors are AAV2 vectors.

[0598] Embodiment 55E. The method of any one of Embodiments 47E-53E, wherein said vectors infect greater than 2 percent of said at least three different retinal cell types within said eye when a titer of at least 1×10⁷ of said vectors is administered intravitreally.

[0599] Embodiment 56E. The method of any one of Embodiments 47E-55E, wherein said exogenous nucleic acid sequence encodes an RNA.

[0600] Embodiment 57E. The method of Embodiment 56E, wherein said RNA is an siRNA or microRNA.

[0601] Embodiment 58E. The method of any one of Embodiments 47E-55E, wherein said exogenous nucleic acid encodes a polypeptide.

[0602] Embodiment 59E. The method of Embodiment 58E, wherein said polypeptide is an ABCA4 polypeptide, a CRB1 polypeptide, an NPHIP5 polypeptide, or an NR2E3 polypeptide.

[0603] Embodiment 60E. The method of any one of Embodiments 47E-59E, wherein said vectors express more of said exogenous nucleic acid sequence in said at least three different retinal cell types than the level of expression in said at least three different retinal cell types from a comparable AAV vector comprising a capsid polypeptide consisting of the amino acid sequence set forth in SEQ ID NO:1.

[0604] Embodiment 61E. The method of any one of Embodiments 47E-60E, wherein said method comprises intravitreally administering a composition comprising said vectors to said mammal, thereby contacting said at least three different retinal cell types with said vectors.

[0605] Embodiment 62E. The method of Embodiment 61E, wherein said composition comprises from about 1×10⁷ to about 1×10¹⁴ of said vector.

[0606] Embodiment 63E. The method of any one of Embodiments 44E-62E, wherein said at least three different retinal cell types are selected from the group consisting of retinal ganglion cells, amacrine cells, horizontal cells, bipolar cells, Muller glia cells, photoreceptor cells, and RPE cells.

[0607] Embodiment 1F. An adeno-associated virus (AAV) vector comprising an AAV capsid polypeptide, wherein said capsid polypeptide comprises the amino acid sequence of any one of SEQ ID NOs:F2-F10.

[0608] Embodiment 2F. The vector of Embodiment 1F, wherein said capsid polypeptide comprises the amino acid sequence of SEQ ID NO:1 except that said amino acid sequence of any one of SEQ ID NOs:F2-F10 is located between amino acid positions 587 and 588 of SEQ ID NO: 1.

[0609] Embodiment 3F. The vector of Embodiment 1F, wherein said capsid polypeptide comprises the amino acid sequence of SEQ ID NO:1 except that said amino acid sequence of any one of SEQ ID NOs:F2-F5 is located between amino acid positions 587 and 588 of SEQ ID NO:1.

[0610] Embodiment 4F. The vector of Embodiment 1F, wherein said capsid polypeptide comprises the amino acid sequence of SEQ ID NO:1 except that said amino acid sequence of any one of SEQ ID NOs:F6-F10 is located between amino acid positions 587 and 588 of SEQ ID NO: 1.

[0611] Embodiment 5F. The vector of Embodiment 1F, wherein said capsid polypeptide comprises the amino acid sequence of SEQ ID NO:1 except that the amino acids from position 585 to 590 of SEQ ID NO:1 are replaced with said amino acid sequence of any one of SEQ ID NOs:F2-F10.

[0612] Embodiment 6F. The vector of any one of Embodiments 1F-5F, wherein said vector is an AAV2 vector.

[0613] Embodiment 7F. The vector of any one of Embodiments 1F-6F, wherein said vector infects greater than 2 percent of RPE cells when a titer of at least 1×10⁷ of said vector is administered intravitreally to an eye of a human (or a non-human primate).

[0614] Embodiment 8F. The vector of any one of Embodiments 1F-7F, wherein said vector comprises an exogenous nucleic acid encoding an RNA or a polypeptide.

[0615] Embodiment 9F. The vector of Embodiment 8F, wherein said exogenous nucleic acid encodes an RNA.

[0616] Embodiment 10F. The vector of Embodiment 9F, wherein said RNA is an siRNA or microRNA.

[0617] Embodiment 11F. The vector of Embodiment 8F, wherein said exogenous nucleic acid encodes a polypeptide.

[0618] Embodiment 12F. The vector of Embodiment 11F, wherein said polypeptide is an ABCA4 polypeptide, a CRB1 polypeptide, an NPHP5 polypeptide, or an NR2E3 polypeptide.

[0619] Embodiment 13F. The vector of any one of Embodiments 1F-12F, wherein said vector expresses more nucleic acid in RPE cells than the level of expression from a comparable AAV vector comprising a capsid polypeptide consisting of the amino acid sequence set forth in SEQ ID NO:1.

[0620] Embodiment 14F. An AAV capsid polypeptide comprising the amino acid sequence of any one of SEQ ID NOs:F2-F10.

[0621] Embodiment 15F. The polypeptide of Embodiment 14F, wherein said polypeptide comprises the amino acid sequence of SEQ ID NO:1 except that said amino acid sequence of any one of SEQ ID NOs:F2-F10 is located between amino acid positions 587 and 588 of SEQ ID NO: 1.

[0622] Embodiment 16F. The polypeptide of Embodiment 14F, wherein said polypeptide comprises the amino acid sequence of SEQ ID NO:1 except that said amino acid sequence of any one of SEQ ID NOs:F2-F5 is located between amino acid positions 587 and 588 of SEQ ID NO:1.

[0623] Embodiment 17F. The polypeptide of Embodiment 14F, wherein said capsid polypeptide comprises the amino acid sequence of SEQ ID NO:1 except that said amino acid sequence of any one of SEQ ID NOs:F6-F10 is located between amino acid positions 587 and 588 of SEQ ID NO:1.

[0624] Embodiment 18F. The polypeptide of Embodiment 14F, wherein said capsid polypeptide comprises the amino acid sequence of SEQ ID NO:1 except that the amino acids from position 585 to 590 of SEQ ID NO:1 are replaced with said amino acid sequence of any one of SEQ ID NOs:F2-F10.

[0625] Embodiment 19F. The polypeptide of any one of Embodiments 14F-18F, wherein an AAV vector comprising said polypeptide infects greater than 2 percent of RPE cells when a titer of at least 1×10⁷ of said vector is administered intravitreally to an eye of a human (or a non-human primate).

[0626] Embodiment 20F. The polypeptide of any one of Embodiments 14F-19F, wherein an AAV vector comprising said polypeptide expresses more nucleic acid in RPE cells than the level of expression from a comparable AAV vector comprising a capsid polypeptide consisting of the amino acid sequence set forth in SEQ ID NO:1.

[0627] Embodiment 21F. A nucleic acid molecule encoding a vector of any one of Embodiments 1F-13F or a polypeptide of any one of Embodiments 14F-20F.

[0628] Embodiment 22F. The nucleic acid molecule of Embodiment 21F, wherein said nucleic acid molecule is DNA.

[0629] Embodiment 23F. A host cell comprising a nucleic acid molecule of any one of Embodiments 21F-22F.

[0630] Embodiment 24F. The host cell of Embodiment 23F, wherein said host cell expresses said vector.

[0631] Embodiment 25F. The host cell of Embodiment 23F, wherein said host cell expresses said polypeptide.

[0632] Embodiment 26F. A host cell comprising a vector of any one of Embodiments 1F-13F or a polypeptide of any one of Embodiments 14F-20F.

[0633] Embodiment 27F. The host cell of any one of Embodiments 23F-26F, wherein said host cell is a retinal cell.

[0634] Embodiment 28F. A composition comprising a vector of any one of Embodiments 1F-13F.

[0635] Embodiment 29F. The composition of Embodiment 28F, wherein said composition comprises from about 1×10⁷ to about 1×10¹⁴ of said vector.

[0636] Embodiment 30F. The composition of any one of Embodiments 28F-29F, wherein said composition comprises phosphate buffered saline, Hank's Balanced Salt Solution, or Pluronic F68.

[0637] Embodiment 31F. A method for delivering an exogenous nucleic acid sequence to RPE cells of an eye of a mammal, wherein said method comprises contacting said RPE cells with an AAV vector comprising an AAV capsid polypeptide and said exogenous nucleic acid sequence, wherein said capsid polypeptide comprises the amino acid sequence of any one of SEQ ID NOs:F2-F10, wherein said AAV vector infects RPE cells, thereby delivering said exogenous nucleic acid sequence to said RPE cells.

[0638] Embodiment 32F. The method of Embodiment 31F, wherein said capsid polypeptide comprises the amino acid sequence of SEQ ID NO:1 except that said amino acid sequence of any one of SEQ ID NOs:F2-F10 is located between amino acid positions 587 and 588 of SEQ ID NO:1.

[0639] Embodiment 33F. The method of Embodiment 31F, wherein said capsid polypeptide comprises the amino acid sequence of SEQ ID NO:1 except that said amino acid sequence of any one of SEQ ID NOs:F2-F5 is located between amino acid positions 587 and 588 of SEQ ID NO:1.

[0640] Embodiment 34F. The method of Embodiment 31F, wherein said capsid polypeptide comprises the amino acid sequence of SEQ ID NO:1 except that said amino acid sequence of any one of SEQ ID NOs:F6-F10 is located between amino acid positions 587 and 588 of SEQ ID NO:1.

[0641] Embodiment 35F. The method of Embodiment 31F, wherein said capsid polypeptide comprises the amino acid sequence of SEQ ID NO:1 except that the amino acids from position 585 to 590 of SEQ ID NO:1 are replaced with said amino acid sequence of any one of SEQ ID NOs:F2-F10.

[0642] Embodiment 36F. The method of any one of Embodiments 31F-35F, wherein said mammal is a human.

[0643] Embodiment 37F. The method of any one of Embodiments 31F-36F, wherein said vector is an AAV2 vector.

[0644] Embodiment 38F. The method of any one of Embodiments 31F-37F, wherein said vector infects greater than 2 percent of RPE cells of an eye when a titer of at least 1×10⁷ of said vector is administered intravitreally to said eye.

[0645] Embodiment 39F. The method of any one of Embodiments 31F-38F, wherein said exogenous nucleic acid sequence encodes an RNA or a polypeptide.

[0646] Embodiment 40F. The method of Embodiment 39F, wherein said exogenous nucleic acid encodes an RNA.

[0647] Embodiment 41F. The method of Embodiment 40F, wherein said RNA is an siRNA or microRNA.

[0648] Embodiment 42F. The method of Embodiment 39F, wherein said exogenous nucleic acid encodes a polypeptide.

[0649] Embodiment 43F. The method of Embodiment 42F, wherein said polypeptide is an ABCA4 polypeptide, a CRB1 polypeptide, an NPHP5 polypeptide, or an NR2E3 polypeptide.

[0650] Embodiment 44F. The method of any one of Embodiments 31F-43F, wherein said vector expresses more of said exogenous nucleic acid sequence in said RPE cells than the level of expression in a RPE cell from a comparable AAV vector comprising a capsid polypeptide consisting of the amino acid sequence set forth in SEQ ID NO:1.

[0651] Embodiment 45F. The method of any one of Embodiments 31F-44F, wherein said method comprises intravitreally administering a composition comprising said vector to said mammal, thereby contacting said RPE cells with said vector.

[0652] Embodiment 46F. The method of Embodiment 45F, wherein said composition comprises from about 1×10⁷ to about 1×10¹⁴ of said vector.

[0653] Embodiment 47F. A method for treating a retinal condition, wherein said method comprises contacting RPE cells of an eye of a mammal having said retinal condition with AAV vectors comprising an AAV capsid polypeptide and an exogenous nucleic acid sequence, wherein said capsid polypeptide comprises the amino acid sequence of any one of SEQ ID NOs:F2-F10, wherein said AAV vectors infect said RPE cells and drive expression of said exogenous nucleic acid sequence within said RPE cells, thereby treating said retinal condition.

[0654] Embodiment 48F. The method of Embodiment 47F, wherein said mammal is a human.

[0655] Embodiment 49F. The method of any one of Embodiments 47F-48F, wherein said retinal condition is selected from the group consisting of cone dystrophy, cone/rod dystrophy, retinitis pigmentosa, macular degeneration, achromatopsia, blue cone monochromcy, and color blindness.

[0656] Embodiment 50F. The method of any one of Embodiments 47F-49F, wherein said capsid polypeptide comprises the amino acid sequence of SEQ ID NO:1 except that said amino acid sequence of any one of SEQ ID NOs:F2-F10 is located between amino acid positions 587 and 588 of SEQ ID NO:1.

[0657] Embodiment 51F. The method of any one of Embodiments 47F-49F, wherein said capsid polypeptide comprises the amino acid sequence of SEQ ID NO:1 except that said amino acid sequence of any one of SEQ ID NOs:F2-F5 is located between amino acid positions 587 and 588 of SEQ ID NO:1.

[0658] Embodiment 52F. The method of any one of Embodiments 47F-49F, wherein said capsid polypeptide comprises the amino acid sequence of SEQ ID NO:1 except that said amino acid sequence of any one of SEQ ID NOs:F6-F10 is located between amino acid positions 587 and 588 of SEQ ID NO:1.

[0659] Embodiment 53F. The method of any one of Embodiments 47F-49F, wherein said capsid polypeptide comprises the amino acid sequence of SEQ ID NO:1 except that the amino acids from position 585 to 590 of SEQ ID NO:1 are replaced with said amino acid sequence of any one of SEQ ID NOs:F2-F10.

[0660] Embodiment 54F. The method of any one of Embodiments 47F-53F, wherein said vectors are AAV2 vectors.

[0661] Embodiment 55F. The method of any one of Embodiments 47F-54F, wherein said vectors infect greater than 2 percent of RPE cells when a titer of at least 1×10⁷ of said vectors is administered intravitreally to an eye of said mammal.

[0662] Embodiment 56F. The method of any one of Embodiments 47F-55F, wherein said exogenous nucleic acid sequence encodes an RNA.

[0663] Embodiment 57F. The method of Embodiment 56F, wherein said RNA is an siRNA or microRNA.

[0664] Embodiment 58F. The method of any one of Embodiments 47F-55F, wherein said exogenous nucleic acid encodes a polypeptide.

[0665] Embodiment 59F. The method of Embodiment 58F, wherein said polypeptide is an ABCA4 polypeptide, a CRB1 polypeptide, an NPHP5 polypeptide, or an NR2E3 polypeptide.

[0666] Embodiment 60F. The method of any one of Embodiments 47F-59F, wherein said vectors express more of said exogenous nucleic acid sequence in said RPE cells than the level of expression in RPE cells from a comparable AAV vector comprising a capsid polypeptide consisting of the amino acid sequence set forth in SEQ ID NO:1.

[0667] Embodiment 61F. The method of any one of Embodiments 47F-60F, wherein said method comprises intravitreally administering a composition comprising said vectors to said mammal, thereby contacting said RPE cells with said vectors.

[0668] Embodiment 62F. The method of Embodiment 61F, wherein said composition comprises from about 1×10⁷ to about 1×10¹⁴ of said vector.

[0669] Embodiment 1G. An adeno-associated virus (AAV) vector comprising an AAV capsid polypeptide, wherein said capsid polypeptide comprises the amino acid sequence of any one of SEQ ID NOs:G2-G77.

[0670] Embodiment 2G. The vector of Embodiment 1G, wherein said capsid polypeptide comprises the amino acid sequence of SEQ ID NO:1 except that said amino acid sequence of any one of SEQ ID NOs:G2-G77 is located between amino acid positions 587 and 588 of SEQ ID NO:1.

[0671] Embodiment 3G. The vector of Embodiment 1G, wherein said capsid polypeptide comprises the amino acid sequence of SEQ ID NO:1 except that said amino acid sequence of any one of SEQ ID NOs:G2-G70 is located between amino acid positions 587 and 588 of SEQ ID NO:1.

[0672] Embodiment 4G. The vector of Embodiment 1G, wherein said capsid polypeptide comprises the amino acid sequence of SEQ ID NO:1 except that the amino acids from position 585 to 590 of SEQ ID NO:1 are replaced with said amino acid sequence of any one of SEQ ID NOs:G2-G77.

[0673] Embodiment 5G. The vector of Embodiment 1G, wherein said capsid polypeptide comprises the amino acid sequence of SEQ ID NO:1 except that the amino acids from position 585 to 590 of SEQ ID NO:1 are replaced with said amino acid sequence of any one of SEQ ID NOs:G71-G77.

[0674] Embodiment 6G. The vector of any one of Embodiments 1G-5G, wherein said vector is an AAV2 vector.

[0675] Embodiment 7G. The vector of any one of Embodiments 1G-6G, wherein said vector infects greater than 2 percent of photoreceptor cells of an eye when a titer of at least 1×10⁷ of said vector is administered intravitreally to said eye.

[0676] Embodiment 8G. The vector of any one of Embodiments 1G-7G, wherein said vector comprises an exogenous nucleic acid encoding an RNA or a polypeptide.

[0677] Embodiment 9G. The vector of Embodiment 8G, wherein said exogenous nucleic acid encodes an RNA.

[0678] Embodiment 10G. The vector of Embodiment 9G, wherein said RNA is an siRNA or microRNA.

[0679] Embodiment 11G. The vector of Embodiment 8G, wherein said exogenous nucleic acid encodes a polypeptide.

[0680] Embodiment 12G. The vector of Embodiment 11G, wherein said polypeptide is an ABCA4 polypeptide, a CRB1 polypeptide, an NPHP5 polypeptide, or an NR2E3 polypeptide.

[0681] Embodiment 13G. The vector of any one of Embodiments 1G-12G, wherein said vector expresses more nucleic acid in photoreceptor cells than the level of expression from a comparable AAV vector comprising a capsid polypeptide consisting of the amino acid sequence set forth in SEQ ID NO:1.

[0682] Embodiment 14G. An AAV capsid polypeptide comprising the amino acid sequence of any one of SEQ ID NOs:G2-G77.

[0683] Embodiment 15G. The polypeptide of Embodiment 14G, wherein said polypeptide comprises the amino acid sequence of SEQ ID NO:1 except that said amino acid sequence of any one of SEQ ID NOs:G2-G77 is located between amino acid positions 587 and 588 of SEQ ID NO:1.

[0684] Embodiment 16G. The polypeptide of Embodiment 14G, wherein said polypeptide comprises the amino acid sequence of SEQ ID NO:1 except that said amino acid sequence of any one of SEQ ID NOs:G2-G70 is located between amino acid positions 587 and 588 of SEQ ID NO:1.

[0685] Embodiment 17G. The polypeptide of Embodiment 14G, wherein said polypeptide comprises the amino acid sequence of SEQ ID NO.1 except that the amino acids from position 585 to 590 of SEQ ID NO:1 are replaced with said amino acid sequence of any one of SEQ ID NOs:G2-G77.

[0686] Embodiment 18G. The polypeptide of Embodiment 14G, wherein said polypeptide comprises the amino acid sequence of SEQ ID NO:1 except that the amino acids from position 585 to 590 of SEQ ID NO:1 are replaced with said amino acid sequence of any one of SEQ ID NOs:G71-G77.

[0687] Embodiment 19G. The polypeptide of any one of Embodiments 14G-18G, wherein an AAV vector comprising said polypeptide infects greater than 2 percent of photoreceptor cells of an eye when a titer of at least 1×10¹⁴ of said vector is administered intravitreally to said eye.

[0688] Embodiment 20G. The polypeptide of any one of Embodiments 14G-19G, wherein an AAV vector comprising said polypeptide expresses more nucleic acid in photoreceptor cells than the level of expression from a comparable AAV vector comprising a capsid polypeptide consisting of the amino acid sequence set forth in SEQ ID NO:1.

[0689] Embodiment 21G. A nucleic acid molecule encoding a vector of any one of Embodiments 1G-13G or a polypeptide of any one of Embodiments 14G-20G.

[0690] Embodiment 22G. The nucleic acid molecule of Embodiment 21G, wherein said nucleic acid molecule is DNA.

[0691] Embodiment 23G. A host cell comprising a nucleic acid molecule of any one of Embodiments 21G-22G.

[0692] Embodiment 24G. The host cell of Embodiment 23G, wherein said host cell expresses said vector.

[0693] Embodiment 25G. The host cell of Embodiment 23G, wherein said host cell expresses said polypeptide.

[0694] Embodiment 26G. A host cell comprising a vector of any one of Embodiments 1G-13G or a polypeptide of any one of Embodiments 14G-20G.

[0695] Embodiment 27G. The host cell of any one of Embodiments 23G-26G, wherein said host cell is a retinal cell.

[0696] Embodiment 28G. A composition comprising a vector of any one of Embodiments 1G-13G.

[0697] Embodiment 29G. The composition of Embodiment 28G, wherein said composition comprises from about 1×10⁷ to about 1×10¹⁴ of said vector.

[0698] Embodiment 30G. The composition of any one of Embodiments 28G-29G, wherein said composition comprises phosphate buffered saline, Hank's Balanced Salt Solution, or Pluronic F68.

[0699] Embodiment 31G. A method for delivering an exogenous nucleic acid sequence to a photoreceptor cell within a mammal, wherein said method comprises contacting said photoreceptor cell with an AAV vector comprising an AAV capsid polypeptide and said exogenous nucleic acid sequence, wherein said capsid polypeptide comprises the amino acid sequence of any one of SEQ ID NOs:G2-G77, wherein said AAV vector infects said photoreceptor cell, thereby delivering said exogenous nucleic acid sequence to said photoreceptor cell.

[0700] Embodiment 32G. The method of Embodiment 31G, wherein said capsid polypeptide comprises the amino acid sequence of SEQ ID NO:1 except that said amino acid sequence of any one of SEQ ID NOs:G2-G77 is located between amino acid positions 587 and 588 of SEQ ID NO:1.

[0701] Embodiment 33G. The method of Embodiment 31G, wherein said capsid polypeptide comprises the amino acid sequence of SEQ ID NO:1 except that said amino acid sequence of any one of SEQ ID NOs:G2-G70 is located between amino acid positions 587 and 588 of SEQ ID NO:1.

[0702] Embodiment 34G. The method of Embodiment 31G, wherein said capsid polypeptide comprises the amino acid sequence of SEQ ID NO:1 except that the amino acids from position 585 to 590 of SEQ ID NO:1 are replaced with said amino acid sequence of any one of SEQ ID NOs:G2-G77.

[0703] Embodiment 35G. The method of Embodiment 31G, wherein said capsid polypeptide comprises the amino acid sequence of SEQ ID NO:1 except that the amino acids from position 585 to 590 of SEQ ID NO:1 are replaced with said amino acid sequence of any one of SEQ ID NOs:G71-G77.

[0704] Embodiment 36G. The method of any one of Embodiments 31G-35G, wherein said mammal is a human.

[0705] Embodiment 37G. The method of any one of Embodiments 31G-36G, wherein said vector is an AAV2 vector.

[0706] Embodiment 38G. The method of any one of Embodiments 31G-37G, wherein said vector infects greater than 2 percent of photoreceptor cells of an eye when a titer of at least 1×10⁷ of said vector is administered intravitreally to said eye.

[0707] Embodiment 39G. The method of any one of Embodiments 31G-38G, wherein said exogenous nucleic acid sequence encodes an RNA or a polypeptide.

[0708] Embodiment 40G. The method of Embodiment 39G, wherein said exogenous nucleic acid encodes an RNA.

[0709] Embodiment 41G. The method of Embodiment 40G, wherein said RNA is an siRNA or microRNA.

[0710] Embodiment 42G. The method of Embodiment 39G, wherein said exogenous nucleic acid encodes a polypeptide.

[0711] Embodiment 43G. The method of Embodiment 42G, wherein said polypeptide is an ABCA4 polypeptide, a CRB1 polypeptide, an NPHP5 polypeptide, or an NR2E3 polypeptide.

[0712] Embodiment 44G. The method of any one of Embodiments 31G-43G, wherein said vector expresses more of said exogenous nucleic acid sequence in said photoreceptor cell than the level of expression in a photoreceptor cell from a comparable AAV vector comprising a capsid polypeptide consisting of the amino acid sequence set forth in SEQ ID NO:1.

[0713] Embodiment 45G. The method of any one of Embodiments 31G-44G, wherein said method comprises intravitreally administering a composition comprising said vector to said mammal, thereby contacting said photoreceptor cell with said vector.

[0714] Embodiment 46G. The method of Embodiment 45G, wherein said composition comprises from about 1×10⁷ to about 1×10⁴ of said vector.

[0715] Embodiment 47G. A method for treating a retinal condition, wherein said method comprises contacting photoreceptor cells of a mammal having said retinal condition with AAV vectors comprising an AAV capsid polypeptide and an exogenous nucleic acid sequence, wherein said capsid polypeptide comprises the amino acid sequence of any one of SEQ ID NOs:G2-G77, wherein said AAV vectors infect said photoreceptor cells and drive expression of said exogenous nucleic acid sequence within said photoreceptor cells, thereby treating said retinal condition.

[0716] Embodiment 48G. The method of Embodiment 47G, wherein said mammal is a human.

[0717] Embodiment 49G. The method of any one of Embodiments 47G-48G, wherein said retinal condition is selected from the group consisting of cone dystrophy, cone/rod dystrophy, retinitis pigmentosa, macular degeneration, achromatopsia, blue cone monochromcy, and color blindness.

[0718] Embodiment 50G. The method of any one of Embodiments 47G-49G, wherein said capsid polypeptide comprises the amino acid sequence of SEQ ID NO:1 except that said amino acid sequence of any one of SEQ ID NOs:G2-G77 is located between amino acid positions 587 and 588 of SEQ ID NO:1.

[0719] Embodiment 51G. The method of any one of Embodiments 47G-49G, wherein said capsid polypeptide comprises the amino acid sequence of SEQ ID NO:1 except that said amino acid sequence of any one of SEQ ID NOs:G2-G70 is located between amino acid positions 587 and 588 of SEQ ID NO:1.

[0720] Embodiment 52G. The method of any one of Embodiments 47G-49G, wherein said capsid polypeptide comprises the amino acid sequence of SEQ ID NO:1 except that the amino acids from position 585 to 590 of SEQ ID NO:1 are replaced with said amino acid sequence of any one of SEQ ID NOs:G2-G77.

[0721] Embodiment 53G. The method of any one of Embodiments 47G-49G, wherein said capsid polypeptide comprises the amino acid sequence of SEQ ID NO:1 except that the amino acids from position 585 to 590 of SEQ ID NO:1 are replaced with said amino acid sequence of any one of SEQ ID NOs:G71-G77.

[0722] Embodiment 54G. The method of any one of Embodiments 47G-53G, wherein said vectors are AAV2 vectors.

[0723] Embodiment 55G. The method of any one of Embodiments 47G-54G, wherein said vectors infect greater than 2 percent of photoreceptor cells when a titer of at least 1×10⁷ of said vectors is administered intravitreally to an eye of said mammal.

[0724] Embodiment 56G. The method of any one of Embodiments 47G-55G, wherein said exogenous nucleic acid sequence encodes an RNA.

[0725] Embodiment 57G. The method of Embodiment 56G, wherein said RNA is an siRNA or microRNA.

[0726] Embodiment 58G. The method of any one of Embodiments 47G-55G, wherein said exogenous nucleic acid encodes a polypeptide.

[0727] Embodiment 59G. The method of Embodiment 58G, wherein said polypeptide is an ABCA4 polypeptide, a CRB1 polypeptide, an NPHP5 polypeptide, or an NR2E3 polypeptide.

[0728] Embodiment 60G. The method of any one of Embodiments 47G-59G, wherein said vectors express more of said exogenous nucleic acid sequence in said photoreceptor cells than the level of expression in photoreceptor cells from a comparable AAV vector comprising a capsid polypeptide consisting of the amino acid sequence set forth in SEQ ID NO:1.

[0729] Embodiment 61G. The method of any one of Embodiments 47G-60G, wherein said method comprises intravitreally administering a composition comprising said vectors to said mammal, thereby contacting said photoreceptor cells with said vectors.

[0730] Embodiment 62G. The method of Embodiment 61G, wherein said composition comprises from about 1×10⁷ to about 1×10¹⁴ of said vector.

[0731] Embodiment 1H. An adeno-associated virus (AAV) vector comprising an AAV capsid polypeptide, wherein said capsid polypeptide comprises the amino acid sequence of any one of SEQ ID NOs:H2-H258.

[0732] Embodiment 2H. The vector of Embodiment 1H, wherein said capsid polypeptide comprises the amino acid sequence of SEQ ID NO:1 except that said amino acid sequence of any one of SEQ ID NOs:H2-H258 is located between amino acid positions 587 and 588 of SEQ ID NO:1.

[0733] Embodiment 3H. The vector of Embodiment 1H, wherein said capsid polypeptide comprises the amino acid sequence of SEQ ID NO:1 except that said amino acid sequence of any one of SEQ ID NOs:H2-H243 is located between amino acid positions 587 and 588 of SEQ ID NO:1.

[0734] Embodiment 4H. The vector of Embodiment 1H, wherein said capsid polypeptide comprises the amino acid sequence of SEQ ID NO:1 except that the amino acids from position 585 to 590 of SEQ ID NO:1 are replaced with said amino acid sequence of any one of SEQ ID NOs:H2-H258.

[0735] Embodiment 5H. The vector of Embodiment 1H, wherein said capsid polypeptide comprises the amino acid sequence of SEQ ID NO:1 except that the amino acids from position 585 to 590 of SEQ ID NO:1 are replaced with said amino acid sequence of any one of SEQ ID NOs:H244-H258.

[0736] Embodiment 6H. The vector of any one of Embodiments 1H-5H, wherein said vector is an AAV2 vector.

[0737] Embodiment 7H. The vector of any one of Embodiments 1H-6H, wherein said vector infects greater than 2 percent of retinal ganglion cells of an eye when a titer of at least 1×10⁷ of said vector is administered intravitreally to said eye.

[0738] Embodiment 8H. The vector of any one of Embodiments 1H-7H, wherein said vector comprises an exogenous nucleic acid encoding an RNA or a polypeptide.

[0739] Embodiment 9H. The vector of Embodiment 8H, wherein said exogenous nucleic acid encodes an RNA.

[0740] Embodiment 10H. The vector of Embodiment 9H, wherein said RNA is an siRNA or microRNA.

[0741] Embodiment 11H. The vector of Embodiment 8H, wherein said exogenous nucleic acid encodes a polypeptide.

[0742] Embodiment 12H. The vector of Embodiment 11H, wherein said polypeptide is an ABCA4 polypeptide, a CRB1 polypeptide, an NPHP5 polypeptide, or an NR2E3 polypeptide.

[0743] Embodiment 13H. The vector of any one of Embodiments 1H-12H, wherein said vector expresses more nucleic acid in retinal ganglion cells than the level of expression from a comparable AAV vector comprising a capsid polypeptide consisting of the amino acid sequence set forth in SEQ ID NO:1.

[0744] Embodiment 14H. An AAV capsid polypeptide comprising the amino acid sequence of any one of SEQ ID NOs:H2-H258.

[0745] Embodiment 15H. The polypeptide of Embodiment 14H, wherein said polypeptide comprises the amino acid sequence of SEQ ID NO:1 except that said amino acid sequence of any one of SEQ ID NOs:H2-H258 is located between amino acid positions 587 and 588 of SEQ ID NO:1.

[0746] Embodiment 16H. The polypeptide of Embodiment 14H, wherein said polypeptide comprises the amino acid sequence of SEQ ID NO:1 except that said amino acid sequence of any one of SEQ ID NOs:H2-H243 is located between amino acid positions 587 and 588 of SEQ ID NO:1.

[0747] Embodiment 17H. The polypeptide of Embodiment 14H, wherein said polypeptide comprises the amino acid sequence of SEQ ID NO:1 except that the amino acids from position 585 to 590 of SEQ ID NO:1 are replaced with said amino acid sequence of any one of SEQ ID NOs:H2-H258.

[0748] Embodiment 18H. The polypeptide of Embodiment 14H, wherein said polypeptide comprises the amino acid sequence of SEQ ID NO:1 except that the amino acids from position 585 to 590 of SEQ ID NO:1 are replaced with said amino acid sequence of any one of SEQ ID NOs:H244-H258.

[0749] Embodiment 19H. The polypeptide of any one of Embodiments 14H-18H, wherein an AAV vector comprising said polypeptide infects greater than 2 percent of retinal ganglion cells of an eye when a titer of at least 1×10⁷ of said vector is administered intravitreally to said eye.

[0750] Embodiment 20H. The polypeptide of any one of Embodiments 14H-19H, wherein an AAV vector comprising said polypeptide expresses more nucleic acid in retinal ganglion cells than the level of expression from a comparable AAV vector comprising a capsid polypeptide consisting of the amino acid sequence set forth in SEQ ID NO:1.

[0751] Embodiment 21H. A nucleic acid molecule encoding a vector of any one of Embodiments 1H-13H or a polypeptide of any one of Embodiments 14H-20H.

[0752] Embodiment 22H. The nucleic acid molecule of Embodiment 21H, wherein said nucleic acid molecule is DNA.

[0753] Embodiment 23H. A host cell comprising a nucleic acid molecule of any one of Embodiments 21H-22H.

[0754] Embodiment 24H. The host cell of Embodiment 23H, wherein said host cell expresses said vector.

[0755] Embodiment 25H. The host cell of Embodiment 23H, wherein said host cell expresses said polypeptide.

[0756] Embodiment 26H. A host cell comprising a vector of any one of Embodiments 1H-13H or a polypeptide of any one of Embodiments 14H-20H.

[0757] Embodiment 27H. The host cell of any one of Embodiments 23H-26H, wherein said host cell is a retinal cell.

[0758] Embodiment 28H. A composition comprising a vector of any one of Embodiments 1H-13H.

[0759] Embodiment 29H. The composition of Embodiment 28H, wherein said composition comprises from about 1×10⁷ to about 1×10¹⁴ of said vector.

[0760] Embodiment 30H. The composition of any one of Embodiments 28H-29H, wherein said composition comprises phosphate buffered saline, Hank's Balanced Salt Solution, or Pluronic F68.

[0761] Embodiment 31H. A method for delivering an exogenous nucleic acid sequence to a retinal ganglion cell within a mammal, wherein said method comprises contacting said retinal ganglion cell with an AAV vector comprising an AAV capsid polypeptide and said exogenous nucleic acid sequence, wherein said capsid polypeptide comprises the amino acid sequence of any one of SEQ ID NOs:H2-H258, wherein said AAV vector infects said photoreceptor cell, thereby delivering said exogenous nucleic acid sequence to said photoreceptor cell.

[0762] Embodiment 32H. The method of Embodiment 31H, wherein said capsid polypeptide comprises the amino acid sequence of SEQ ID NO:1 except that said amino acid sequence of any one of SEQ ID NOs:H2-H258 is located between amino acid positions 587 and 588 of SEQ ID NO:1.

[0763] Embodiment 33H. The method of Embodiment 31H, wherein said capsid polypeptide comprises the amino acid sequence of SEQ ID NO:1 except that said amino acid sequence of any one of SEQ ID NOs:H2-H243 is located between amino acid positions 587 and 588 of SEQ ID NO:1.

[0764] Embodiment 34H. The method of Embodiment 31H, wherein said capsid polypeptide comprises the amino acid sequence of SEQ ID NO:1 except that the amino acids from position 585 to 590 of SEQ ID NO:1 are replaced with said amino acid sequence of any one of SEQ ID NOs:H2-H258.

[0765] Embodiment 35H. The method of Embodiment 31H, wherein said capsid polypeptide comprises the amino acid sequence of SEQ ID NO:1 except that the amino acids from position 585 to 590 of SEQ ID NO:1 are replaced with said amino acid sequence of any one of SEQ ID NOs:H244-H258.

[0766] Embodiment 36H. The method of any one of Embodiments 31H-35H, wherein said mammal is a human.

[0767] Embodiment 37H. The method of any one of Embodiments 31H-36H, wherein said vector is an AAV2 vector.

[0768] Embodiment 38H. The method of any one of Embodiments 31H-37H, wherein said vector infects greater than 2 percent of retinal ganglion cells of an eye when a titer of at least 1×10⁷ of said vector is administered intravitreally to said eye.

[0769] Embodiment 39H. The method of any one of Embodiments 31H-38H, wherein said exogenous nucleic acid sequence encodes an RNA or a polypeptide.

[0770] Embodiment 40H. The method of Embodiment 39H, wherein said exogenous nucleic acid encodes an RNA.

[0771] Embodiment 41H. The method of Embodiment 40H, wherein said RNA is an siRNA or microRNA.

[0772] Embodiment 42H. The method of Embodiment 39H, wherein said exogenous nucleic acid encodes a polypeptide.

[0773] Embodiment 43H. The method of Embodiment 42H, wherein said polypeptide is an ABCA4 polypeptide, a CRB1 polypeptide, an NPHP5 polypeptide, or an NR2E3 polypeptide.

[0774] Embodiment 44H. The method of any one of Embodiments 31H-43H, wherein said vector expresses more of said exogenous nucleic acid sequence in said retinal ganglion cell than the level of expression in a retinal ganglion cell from a comparable AAV vector comprising a capsid polypeptide consisting of the amino acid sequence set forth in SEQ ID NO:1.

[0775] Embodiment 45H. The method of any one of Embodiments 31H-44H, wherein said method comprises intravitreally administering a composition comprising said vector to said mammal, thereby contacting said retinal ganglion cell with said vector.

[0776] Embodiment 46H. The method of Embodiment 45H, wherein said composition comprises from about 1×10⁷ to about 1×10¹⁴ of said vector.

[0777] Embodiment 47H. A method for treating a retinal condition, wherein said method comprises contacting retinal ganglion cells of a mammal having said retinal condition with AAV vectors comprising an AAV capsid polypeptide and an exogenous nucleic acid sequence, wherein said capsid polypeptide comprises the amino acid sequence of any one of SEQ ID NOs:H2-H258, wherein said AAV vectors infect said retinal ganglion cells and drive expression of said exogenous nucleic acid sequence within said retinal ganglion cells, thereby treating said retinal condition.

[0778] Embodiment 48H. The method of Embodiment 47H, wherein said mammal is a human.

[0779] Embodiment 49H. The method of any one of Embodiments 47H-48H, wherein said retinal condition is selected from the group consisting of cone dystrophy, cone/rod dystrophy, retinitis pigmentosa, macular degeneration, achromatopsia, blue cone monochromcy, and color blindness.

[0780] Embodiment 50H. The method of any one of Embodiments 47H-49H, wherein said capsid polypeptide comprises the amino acid sequence of SEQ ID NO:1 except that said amino acid sequence of any one of SEQ ID NOs:H2-H258 is located between amino acid positions 587 and 588 of SEQ ID NO:1.

[0781] Embodiment 51H. The method of any one of Embodiments 47H-49H, wherein said capsid polypeptide comprises the amino acid sequence of SEQ ID NO:1 except that said amino acid sequence of any one of SEQ ID NOs:H2-H243 is located between amino acid positions 587 and 588 of SEQ ID NO:1.

[0782] Embodiment 52H. The method of any one of Embodiments 47H-49H, wherein said capsid polypeptide comprises the amino acid sequence of SEQ ID NO:1 except that the amino acids from position 585 to 590 of SEQ ID NO:1 are replaced with said amino acid sequence of any one of SEQ ID NOs:H2-H258.

[0783] Embodiment 53H. The method of any one of Embodiments 47H-49H, wherein said capsid polypeptide comprises the amino acid sequence of SEQ ID NO:1 except that the amino acids from position 585 to 590 of SEQ ID NO:1 are replaced with said amino acid sequence of any one of SEQ ID NOs:H244-H258.

[0784] Embodiment 54H. The method of any one of Embodiments 47H-53H, wherein said vectors are AAV2 vectors.

[0785] Embodiment 55H. The method of any one of Embodiments 47H-54H, wherein said vectors infect greater than 2 percent of retinal ganglion cells when a titer of at least 1×10⁷ of said vectors is administered intravitreally to an eye of said mammal.

[0786] Embodiment 56H. The method of any one of Embodiments 47H-55H, wherein said exogenous nucleic acid sequence encodes an RNA.

[0787] Embodiment 57H. The method of Embodiment 56H, wherein said RNA is an siRNA or microRNA.

[0788] Embodiment 58H. The method of any one of Embodiments 47H-55H, wherein said exogenous nucleic acid encodes a polypeptide.

[0789] Embodiment 59H. The method of Embodiment 58H, wherein said polypeptide is an ABCA4 polypeptide, a CRB1 polypeptide, an NPHP5 polypeptide, or an NR2E3 polypeptide.

[0790] Embodiment 60H. The method of any one of Embodiments 47H-59H, wherein said vectors express more of said exogenous nucleic acid sequence in said retinal ganglion cells than the level of expression in retinal ganglion cells from a comparable AAV vector comprising a capsid polypeptide consisting of the amino acid sequence set forth in SEQ ID NO:1.

[0791] Embodiment 61H. The method of any one of Embodiments 47H-60H, wherein said method comprises intravitreally administering a composition comprising said vectors to said mammal, thereby contacting said retinal ganglion cells with said vectors.

[0792] Embodiment 62H. The method of Embodiment 61H, wherein said composition comprises from about 1×10⁷ to about 1×10¹⁴ of said vector.

[0793] Embodiment 1I. An adeno-associated virus (AAV) vector comprising an AAV capsid polypeptide, wherein said capsid polypeptide comprises the amino acid sequence of any one of SEQ ID NOs:I2-I74.

[0794] Embodiment 2I. The vector of Embodiment 1I, wherein said capsid polypeptide comprises the amino acid sequence of SEQ ID NO:1 except that said amino acid sequence of any one of SEQ ID NOs:I2-174 is located between amino acid positions 587 and 588 of SEQ ID NO:1.

[0795] Embodiment 3I. The vector of Embodiment 1I, wherein said capsid polypeptide comprises the amino acid sequence of SEQ ID NO:1 except that said amino acid sequence of any one of SEQ ID NOs:I2-167 is located between amino acid positions 587 and 588 of SEQ ID NO:1.

[0796] Embodiment 4I. The vector of Embodiment 1I, wherein said capsid polypeptide comprises the amino acid sequence of SEQ ID NO:1 except that the amino acids from position 585 to 590 of SEQ ID NO:1 are replaced with said amino acid sequence of any one of SEQ ID NOs:I2-174.

[0797] Embodiment 5I. The vector of Embodiment 1I, wherein said capsid polypeptide comprises the amino acid sequence of SEQ ID NO:1 except that the amino acids from position 585 to 590 of SEQ ID NO:1 are replaced with said amino acid sequence of any one of SEQ ID NOs:I68-174.

[0798] Embodiment 6I. The vector of any one of Embodiments 1I-5I, wherein said vector is an AAV2 vector.

[0799] Embodiment 7I. The vector of any one of Embodiments 1I-6I, wherein said vector infects greater than 2 percent of bipolar cells of the retina of an eye when a titer of at least 1×10⁷ of said vector is administered intravitreally to said eye.

[0800] Embodiment 8I. The vector of any one of Embodiments 1I-7I, wherein said vector comprises an exogenous nucleic acid encoding an RNA or a polypeptide.

[0801] Embodiment 9I. The vector of Embodiment 8I, wherein said exogenous nucleic acid encodes an RNA.

[0802] Embodiment 10I. The vector of Embodiment 9I, wherein said RNA is an siRNA or microRNA.

[0803] Embodiment 11I. The vector of Embodiment 8I, wherein said exogenous nucleic acid encodes a polypeptide.

[0804] Embodiment 12I. The vector of Embodiment 11I, wherein said polypeptide is an ABCA4 polypeptide, a CRB1 polypeptide, an NPHP5 polypeptide, or an NR2E3 polypeptide.

[0805] Embodiment 13I. The vector of any one of Embodiments 1I-12I, wherein said vector expresses more nucleic acid in bipolar cells of the retina than the level of expression from a comparable AAV vector comprising a capsid polypeptide consisting of the amino acid sequence set forth in SEQ ID NO:1.

[0806] Embodiment 14I. An AAV capsid polypeptide comprising the amino acid sequence of any one of SEQ ID NOs:I2-174.

[0807] Embodiment 15I. The polypeptide of Embodiment 14I, wherein said polypeptide comprises the amino acid sequence of SEQ ID NO:1 except that said amino acid sequence of any one of SEQ ID NOs:I2-I74 is located between amino acid positions 587 and 588 of SEQ ID NO:1.

[0808] Embodiment 16I. The polypeptide of Embodiment 14I, wherein said polypeptide comprises the amino acid sequence of SEQ ID NO:1 except that said amino acid sequence of any one of SEQ ID NOs:I2-167 is located between amino acid positions 587 and 588 of SEQ ID NO:1.

[0809] Embodiment 17I. The polypeptide of Embodiment 14I, wherein said capsid polypeptide comprises the amino acid sequence of SEQ ID NO:1 except that the amino acids from position 585 to 590 of SEQ ID NO:1 are replaced with said amino acid sequence of any one of SEQ ID NOs:I2-I74.

[0810] Embodiment 18I. The polypeptide of Embodiment 14I, wherein said capsid polypeptide comprises the amino acid sequence of SEQ ID NO:1 except that the amino acids from position 585 to 590 of SEQ ID NO:1 are replaced with said amino acid sequence of any one of SEQ ID NOs:I68-I74.

[0811] Embodiment 19I. The polypeptide of any one of Embodiments 14I-18I, wherein an AAV vector comprising said polypeptide infects greater than 2 percent of bipolar cells of the retina of an eye when a titer of at least 1×10⁷ of said vector is administered intravitreally to said eye.

[0812] Embodiment 20I. The polypeptide of any one of Embodiments 14I-19I, wherein an AAV vector comprising said polypeptide expresses more nucleic acid in bipolar cells of the retina than the level of expression from a comparable AAV vector comprising a capsid polypeptide consisting of the amino acid sequence set forth in SEQ ID NO:1.

[0813] Embodiment 21I. A nucleic acid molecule encoding a vector of any one of Embodiments 1I-13I or a polypeptide of any one of Embodiments 14I-20I.

[0814] Embodiment 22I. The nucleic acid molecule of Embodiment 21I, wherein said nucleic acid molecule is DNA.

[0815] Embodiment 23I. A host cell comprising a nucleic acid molecule of any one of Embodiments 21I-22I.

[0816] Embodiment 24I. The host cell of Embodiment 23I, wherein said host cell expresses said vector.

[0817] Embodiment 25I. The host cell of Embodiment 23I, wherein said host cell expresses said polypeptide.

[0818] Embodiment 26I. A host cell comprising a vector of any one of Embodiments 1I-13I or a polypeptide of any one of Embodiments 14I-201.

[0819] Embodiment 27I. The host cell of any one of Embodiments 23I-26I, wherein said host cell is a retinal cell.

[0820] Embodiment 28I. A composition comprising a vector of any one of Embodiments 1I-13I.

[0821] Embodiment 29I. The composition of Embodiment 28I, wherein said composition comprises from about 1×10⁷ to about 1×10¹⁴ of said vector.

[0822] Embodiment 30I. The composition of any one of Embodiments 28I-29I, wherein said composition comprises phosphate buffered saline, Hank's Balanced Salt Solution, or Pluronic F68.

[0823] Embodiment 31I. A method for delivering an exogenous nucleic acid sequence to a bipolar cell of the retina within a mammal, wherein said method comprises contacting said bipolar cell with an AAV vector comprising an AAV capsid polypeptide and said exogenous nucleic acid sequence, wherein said capsid polypeptide comprises the amino acid sequence of any one of SEQ ID NOs:I2-I74, wherein said AAV vector infects said bipolar cell, thereby delivering said exogenous nucleic acid sequence to said bipolar cell.

[0824] Embodiment 32I. The method of Embodiment 31I, wherein said capsid polypeptide comprises the amino acid sequence of SEQ ID NO:1 except that said amino acid sequence of any one of SEQ ID NOs:I2-174 is located between amino acid positions 587 and 588 of SEQ ID NO:1.

[0825] Embodiment 33I. The method of Embodiment 31I, wherein said capsid polypeptide comprises the amino acid sequence of SEQ ID NO:1 except that said amino acid sequence of any one of SEQ ID NOs:I2-167 is located between amino acid positions 587 and 588 of SEQ ID NO:1.

[0826] Embodiment 34I. The method of Embodiment 31I, wherein said capsid polypeptide comprises the amino acid sequence of SEQ ID NO:1 except that the amino acids from position 585 to 590 of SEQ ID NO:1 are replaced with said amino acid sequence of any one of SEQ ID NOs:I2-I74.

[0827] Embodiment 35I. The method of Embodiment 31I, wherein said capsid polypeptide comprises the amino acid sequence of SEQ ID NO:1 except that the amino acids from position 585 to 590 of SEQ ID NO:1 are replaced with said amino acid sequence of any one of SEQ ID NOs:I68-I74.

[0828] Embodiment 36I. The method of any one of Embodiments 31I-35I, wherein said mammal is a human.

[0829] Embodiment 37I. The method of any one of Embodiments 31I-36I, wherein said vector is an AAV2 vector.

[0830] Embodiment 38I. The method of any one of Embodiments 31I-37I, wherein said vector infects greater than 2 percent of bipolar cells of the retina of an eye when a titer of at least 1×10⁷ of said vector is administered intravitreally to said eye.

[0831] Embodiment 39I. The method of any one of Embodiments 31I-38I, wherein said exogenous nucleic acid sequence encodes an RNA or a polypeptide.

[0832] Embodiment 40I. The method of Embodiment 39I, wherein said exogenous nucleic acid encodes an RNA.

[0833] Embodiment 41I. The method of Embodiment 40I, wherein said RNA is an siRNA or microRNA.

[0834] Embodiment 42I. The method of Embodiment 39I, wherein said exogenous nucleic acid encodes a polypeptide.

[0835] Embodiment 43I. The method of Embodiment 42I, wherein said polypeptide is an ABCA4 polypeptide, a CRB1 polypeptide, an NPHP5 polypeptide, or an NR2E3 polypeptide.

[0836] Embodiment 44I. The method of any one of Embodiments 31I-43I, wherein said vector expresses more of said exogenous nucleic acid sequence in said bipolar cell than the level of expression in a bipolar cell of the retina from a comparable AAV vector comprising a capsid polypeptide consisting of the amino acid sequence set forth in SEQ ID NO:1.

[0837] Embodiment 45I. The method of any one of Embodiments 31I-44I, wherein said method comprises intravitreally administering a composition comprising said vector to said mammal, thereby contacting said bipolar cell with said vector.

[0838] Embodiment 46I. The method of Embodiment 45I, wherein said composition comprises from about 1×10⁷ to about 1×10¹⁴ of said vector.

[0839] Embodiment 47I. A method for treating a retinal condition, wherein said method comprises contacting bipolar cells of the retina of a mammal having said retinal condition with AAV vectors comprising an AAV capsid polypeptide and an exogenous nucleic acid sequence, wherein said capsid polypeptide comprises the amino acid sequence of any one of SEQ ID NOs:I2-I74, wherein said AAV vectors infect said bipolar cells and drive expression of said exogenous nucleic acid sequence within said bipolar cells, thereby treating said retinal condition.

[0840] Embodiment 48I. The method of Embodiment 47I, wherein said mammal is a human.

[0841] Embodiment 49I. The method of any one of Embodiments 47I-48I, wherein said retinal condition is selected from the group consisting of cone dystrophy, cone/rod dystrophy, retinitis pigmentosa, macular degeneration, achromatopsia, blue cone monochromcy, and color blindness.

[0842] Embodiment 50I. The method of any one of Embodiments 47I-49I, wherein said capsid polypeptide comprises the amino acid sequence of SEQ ID NO:1 except that said amino acid sequence of any one of SEQ ID NOs:I2-174 is located between amino acid positions 587 and 588 of SEQ ID NO:1.

[0843] Embodiment 51I. The method of any one of Embodiments 47I-49I, wherein said capsid polypeptide comprises the amino acid sequence of SEQ ID NO:1 except that said amino acid sequence of any one of SEQ ID NOs:I2-T67 is located between amino acid positions 587 and 588 of SEQ ID NO:1.

[0844] Embodiment 52I. The method of any one of Embodiments 47I-49I, wherein said capsid polypeptide comprises the amino acid sequence of SEQ ID NO:1 except that the amino acids from position 585 to 590 of SEQ ID NO:1 are replaced with said amino acid sequence of any one of SEQ ID NOs:I2-I74.

[0845] Embodiment 53I. The method of any one of Embodiments 47I-49I, wherein said capsid polypeptide comprises the amino acid sequence of SEQ ID NO:1 except that the amino acids from position 585 to 590 of SEQ ID NO:1 are replaced with said amino acid sequence of any one of SEQ ID NOs:I68-I74.

[0846] Embodiment 54I. The method of any one of Embodiments 47I-53I, wherein said vectors are AAV2 vectors.

[0847] Embodiment 55I. The method of any one of Embodiments 47I-54I, wherein said vectors infect greater than 2 percent of bipolar cells of the retina when a titer of at least 1×10¹⁴ of said vectors is administered intravitreally to an eye of said mammal.

[0848] Embodiment 56I. The method of any one of Embodiments 47I-55I, wherein said exogenous nucleic acid sequence encodes an RNA.

[0849] Embodiment 57I. The method of Embodiment 56I, wherein said RNA is an siRNA or microRNA.

[0850] Embodiment 58I. The method of any one of Embodiments 47I-55I, wherein said exogenous nucleic acid encodes a polypeptide.

[0851] Embodiment 59I. The method of Embodiment 58I, wherein said polypeptide is an ABCA4 polypeptide, a CRB1 polypeptide, an NPHP5 polypeptide, or an NR2E3 polypeptide.

[0852] Embodiment 60I. The method of any one of Embodiments 47I-59I, wherein said vectors express more of said exogenous nucleic acid sequence in said bipolar cells than the level of expression in bipolar cells of the retina from a comparable AAV vector comprising a capsid polypeptide consisting of the amino acid sequence set forth in SEQ ID NO:1.

[0853] Embodiment 61I. The method of any one of Embodiments 47I-60I, wherein said method comprises intravitreally administering a composition comprising said vectors to said mammal, thereby contacting said bipolar cells with said vectors.

[0854] Embodiment 62I. The method of Embodiment 61I, wherein said composition comprises from about 1×10⁷ to about 1×10¹⁴ of said vector.

[0855] Embodiment 1J. An adeno-associated virus (AAV) vector comprising an AAV capsid polypeptide, wherein said capsid polypeptide comprises the amino acid sequence of any one of SEQ ID NOs:J2-J64.

[0856] Embodiment 2J. The vector of Embodiment 1J, wherein said capsid polypeptide comprises the amino acid sequence of SEQ ID NO:1 except that said amino acid sequence of any one of SEQ ID NOs:J2-J64 is located between amino acid positions 587 and 588 of SEQ ID NO: 1.

[0857] Embodiment 3J. The vector of Embodiment 1J, wherein said capsid polypeptide comprises the amino acid sequence of SEQ ID NO:1 except that said amino acid sequence of any one of SEQ ID NOs:J2-J61 is located between amino acid positions 587 and 588 of SEQ ID NO: 1.

[0858] Embodiment 4J. The vector of Embodiment 1J, wherein said capsid polypeptide comprises the amino acid sequence of SEQ ID NO:1 except that the amino acids from position 585 to 590 of SEQ ID NO:1 are replaced with said amino acid sequence of any one of SEQ ID NOs:J2-J64.

[0859] Embodiment 5J. The vector of Embodiment 1J, wherein said capsid polypeptide comprises the amino acid sequence of SEQ ID NO:1 except that the amino acids from position 585 to 590 of SEQ ID NO:1 are replaced with said amino acid sequence of any one of SEQ ID NOs:J62-J64.

[0860] Embodiment 6J. The vector of any one of Embodiments 1J-5J, wherein said vector is an AAV2 vector.

[0861] Embodiment 7J. The vector of any one of Embodiments 1J-6J, wherein said vector infects greater than 2 percent of ON-retinal ganglion cells of an eye when a titer of at least 1×10⁷ of said vector is administered intravitreally to said eye.

[0862] Embodiment 8J. The vector of any one of Embodiments 1J-7J, wherein said vector comprises an exogenous nucleic acid encoding an RNA or a polypeptide.

[0863] Embodiment 9J. The vector of Embodiment 8J, wherein said exogenous nucleic acid encodes an RNA.

[0864] Embodiment 10J. The vector of Embodiment 9J, wherein said RNA is an siRNA or microRNA.

[0865] Embodiment 11J. The vector of Embodiment 8J, wherein said exogenous nucleic acid encodes a polypeptide.

[0866] Embodiment 12J. The vector of Embodiment 11J, wherein said polypeptide is an ABCA4 polypeptide, a CRB1 polypeptide, an NPHP5 polypeptide, or an NR2E3 polypeptide.

[0867] Embodiment 13J. The vector of any one of Embodiments 1J-12J, wherein said vector expresses more nucleic acid in ON-retinal ganglion cells than the level of expression from a comparable AAV vector comprising a capsid polypeptide consisting of the amino acid sequence set forth in SEQ ID NO:1.

[0868] Embodiment 14J. An AAV capsid polypeptide comprising the amino acid sequence of any one of SEQ ID NOs:J2-J64.

[0869] Embodiment 15J. The polypeptide of Embodiment 14J, wherein said polypeptide comprises the amino acid sequence of SEQ ID NO:1 except that said amino acid sequence of any one of SEQ ID NOs:J2-J64 is located between amino acid positions 587 and 588 of SEQ ID NO: 1.

[0870] Embodiment 16J. The polypeptide of Embodiment 14J, wherein said polypeptide comprises the amino acid sequence of SEQ ID NO:1 except that said amino acid sequence of any one of SEQ ID NOs:J2-J61 is located between amino acid positions 587 and 588 of SEQ ID NO: 1.

[0871] Embodiment 17J. The polypeptide of Embodiment 14J, wherein said polypeptide comprises the amino acid sequence of SEQ ID NO:1 except that the amino acids from position 585 to 590 of SEQ ID NO:1 are replaced with said amino acid sequence of any one of SEQ ID NOs:J2-J64.

[0872] Embodiment 18J. The polypeptide of Embodiment 14J, wherein said polypeptide comprises the amino acid sequence of SEQ ID NO:1 except that the amino acids from position 585 to 590 of SEQ ID NO:1 are replaced with said amino acid sequence of any one of SEQ ID NOs:J62-J64.

[0873] Embodiment 19J. The polypeptide of any one of Embodiments 14J-18J, wherein an AAV vector comprising said polypeptide infects greater than 2 percent of ON-retinal ganglion cells of an eye when a titer of at least 1×10⁷ of said vector is administered intravitreally to said eye.

[0874] Embodiment 20J. The polypeptide of any one of Embodiments 14J-19J, wherein an AAV vector comprising said polypeptide expresses more nucleic acid in ON-retinal ganglion cells than the level of expression from a comparable AAV vector comprising a capsid polypeptide consisting of the amino acid sequence set forth in SEQ ID NO:1.

[0875] Embodiment 21J. A nucleic acid molecule encoding a vector of any one of Embodiments 1J-13J or a polypeptide of any one of Embodiments 14J-20J.

[0876] Embodiment 22J. The nucleic acid molecule of Embodiment 21J, wherein said nucleic acid molecule is DNA.

[0877] Embodiment 23J. A host cell comprising a nucleic acid molecule of any one of Embodiments 21J-22J.

[0878] Embodiment 24J. The host cell of Embodiment 23J, wherein said host cell expresses said vector.

[0879] Embodiment 25J. The host cell of Embodiment 23J, wherein said host cell expresses said polypeptide.

[0880] Embodiment 26J. A host cell comprising a vector of any one of Embodiments 1J-13J or a polypeptide of any one of Embodiments 14J-20J.

[0881] Embodiment 27J. The host cell of any one of Embodiments 23J-26J, wherein said host cell is a retinal cell.

[0882] Embodiment 28J. A composition comprising a vector of any one of Embodiments 1J-13J.

[0883] Embodiment 29J. The composition of Embodiment 28J, wherein said composition comprises from about 1×10⁷ to about 1×10¹⁴ of said vector.

[0884] Embodiment 30J. The composition of any one of Embodiments 28J-29J, wherein said composition comprises phosphate buffered saline, Hank's Balanced Salt Solution, or Pluronic F68.

[0885] Embodiment 31J. A method for delivering an exogenous nucleic acid sequence to an ON-retinal ganglion cell within a mammal, wherein said method comprises contacting said ON-retinal ganglion cell with an AAV vector comprising an AAV capsid polypeptide and said exogenous nucleic acid sequence, wherein said capsid polypeptide comprises the amino acid sequence of any one of SEQ ID NOs:2J-64J, wherein said AAV vector infects said ON-retinal ganglion cell, thereby delivering said exogenous nucleic acid sequence to said ON-retinal ganglion cell.

[0886] Embodiment 32J. The method of Embodiment 31J, wherein said capsid polypeptide comprises the amino acid sequence of SEQ ID NO:1 except that said amino acid sequence of any one of SEQ ID NOs:J2-J64 is located between amino acid positions 587 and 588 of SEQ ID NO:1.

[0887] Embodiment 33J. The method of Embodiment 31J, wherein said capsid polypeptide comprises the amino acid sequence of SEQ ID NO:1 except that said amino acid sequence of any one of SEQ ID NOs:J2-J61 is located between amino acid positions 587 and 588 of SEQ ID NO:1.

[0888] Embodiment 34J. The method of Embodiment 31J, wherein said capsid polypeptide comprises the amino acid sequence of SEQ ID NO:1 except that the amino acids from position 585 to 590 of SEQ ID NO:1 are replaced with said amino acid sequence of any one of SEQ ID NOs:J2-J64.

[0889] Embodiment 35J. The method of Embodiment J31, wherein said capsid polypeptide comprises the amino acid sequence of SEQ ID NO:1 except that the amino acids from position 585 to 590 of SEQ ID NO:1 are replaced with said amino acid sequence of any one of SEQ ID NOs:J62-J64.

[0890] Embodiment 36J. The method of any one of Embodiments 31J-35J, wherein said mammal is a human.

[0891] Embodiment 37J. The method of any one of Embodiments 31J-36J, wherein said vector is an AAV2 vector.

[0892] Embodiment 38J. The method of any one of Embodiments 31J-37J, wherein said vector infects greater than 2 percent of ON-retinal ganglion cells of an eye when a titer of at least 1×10⁷ of said vector is administered intravitreally to said eye.

[0893] Embodiment 39J. The method of any one of Embodiments 31J-38J, wherein said exogenous nucleic acid sequence encodes an RNA or a polypeptide.

[0894] Embodiment 40J. The method of Embodiment 39J, wherein said exogenous nucleic acid encodes an RNA.

[0895] Embodiment 41J. The method of Embodiment 40J, wherein said RNA is an siRNA or microRNA.

[0896] Embodiment 42J. The method of Embodiment 39J, wherein said exogenous nucleic acid encodes a polypeptide.

[0897] Embodiment 43J. The method of Embodiment 42J, wherein said polypeptide is an ABCA4 polypeptide, a CRB1 polypeptide, an NPHP5 polypeptide, or an NR2E3 polypeptide.

[0898] Embodiment 44J. The method of any one of Embodiments 31J-43J, wherein said vector expresses more of said exogenous nucleic acid sequence in said ON-retinal ganglion cell than the level of expression in an ON-retinal ganglion cell from a comparable AAV vector comprising a capsid polypeptide consisting of the amino acid sequence set forth in SEQ ID NO:1.

[0899] Embodiment 45J. The method of any one of Embodiments 31J-44J, wherein said method comprises intravitreally administering a composition comprising said vector to said mammal, thereby contacting said ON-retinal ganglion cell with said vector.

[0900] Embodiment 46J. The method of Embodiment 45J, wherein said composition comprises from about 1×10⁷ to about 1×10¹⁴ of said vector.

[0901] Embodiment 47J. A method for treating a retinal condition, wherein said method comprises contacting ON-retinal ganglion cells of a mammal having said retinal condition with AAV vectors comprising an AAV capsid polypeptide and an exogenous nucleic acid sequence, wherein said capsid polypeptide comprises the amino acid sequence of any one of SEQ ID NOs:J2-J64, wherein said AAV vectors infect said ON-retinal ganglion cells and drive expression of said exogenous nucleic acid sequence within said ON-retinal ganglion cells, thereby treating said retinal condition.

[0902] Embodiment 48J. The method of Embodiment 47J, wherein said mammal is a human.

[0903] Embodiment 49J. The method of any one of Embodiments 47J-48J, wherein said retinal condition is selected from the group consisting of cone dystrophy, cone/rod dystrophy, retinitis pigmentosa, macular degeneration, achromatopsia, blue cone monochromcy, and color blindness.

[0904] Embodiment 50J. The method of any one of Embodiments 47J-49J, wherein said capsid polypeptide comprises the amino acid sequence of SEQ ID NO:1 except that said amino acid sequence of any one of SEQ ID NOs:J2-J64 is located between amino acid positions 587 and 588 of SEQ ID NO:1.

[0905] Embodiment 51J. The method of any one of Embodiments 47J-49J, wherein said capsid polypeptide comprises the amino acid sequence of SEQ ID NO:1 except that said amino acid sequence of any one of SEQ ID NOs:J2-J61 is located between amino acid positions 587 and 588 of SEQ ID NO:1.

[0906] Embodiment 52J. The method of any one of Embodiments 47J-49J, wherein said capsid polypeptide comprises the amino acid sequence of SEQ ID NO:1 except that the amino acids from position 585 to 590 of SEQ ID NO:1 are replaced with said amino acid sequence of any one of SEQ ID NOs:J2-J64.

[0907] Embodiment 53J. The method of any one of Embodiments 47J-49J, wherein said capsid polypeptide comprises the amino acid sequence of SEQ ID NO:1 except that the amino acids from position 585 to 590 of SEQ ID NO:1 are replaced with said amino acid sequence of any one of SEQ ID NOs:J62-J64.

[0908] Embodiment 54J. The method of any one of Embodiments 47J-53J, wherein said vectors are AAV2 vectors.

[0909] Embodiment 55J. The method of any one of Embodiments 47J-54J, wherein said vectors infect greater than 2 percent of ON-retinal ganglion cells when a titer of at least 1×10⁷ of said vectors is administered intravitreally to an eye of said mammal.

[0910] Embodiment 56J. The method of any one of Embodiments 47J-55J, wherein said exogenous nucleic acid sequence encodes an RNA.

[0911] Embodiment 57J. The method of Embodiment 56J, wherein said RNA is an siRNA or microRNA.

[0912] Embodiment 58J. The method of any one of Embodiments 47J-55J, wherein said exogenous nucleic acid encodes a polypeptide.

[0913] Embodiment 59J. The method of Embodiment 58J, wherein said polypeptide is an ABCA4 polypeptide, a CRB1 polypeptide, an NPHP5 polypeptide, or an NR2E3 polypeptide.

[0914] Embodiment 60J. The method of any one of Embodiments 47J-59J, wherein said vectors express more of said exogenous nucleic acid sequence in said ON-retinal ganglion cells than the level of expression in ON-retinal ganglion cells from a comparable AAV vector comprising a capsid polypeptide consisting of the amino acid sequence set forth in SEQ ID NO:1.

[0915] Embodiment 61J. The method of any one of Embodiments 47J-60J, wherein said method comprises intravitreally administering a composition comprising said vectors to said mammal, thereby contacting said ON-retinal ganglion cells with said vectors.

[0916] Embodiment 62J. The method of Embodiment 61J, wherein said composition comprises from about 1×10⁷ to about 1×10¹⁴ of said vector.

[0917] Embodiment 1K. An adeno-associated virus (AAV) vector comprising an AAV capsid polypeptide, wherein said capsid polypeptide comprises the amino acid sequence of any one of SEQ ID NOs:K2-K63.

[0918] Embodiment 2K. The vector of Embodiment 1K, wherein said capsid polypeptide comprises the amino acid sequence of SEQ ID NO:1 except that said amino acid sequence of any one of SEQ ID NOs:K2-K63 is located between amino acid positions 587 and 588 of SEQ ID NO:1.

[0919] Embodiment 3K. The vector of Embodiment 1K, wherein said capsid polypeptide comprises the amino acid sequence of SEQ ID NO:1 except that said amino acid sequence of any one of SEQ ID NOs:K2-K60 is located between amino acid positions 587 and 588 of SEQ ID NO:1.

[0920] Embodiment 4K. The vector of Embodiment 1K, wherein said capsid polypeptide comprises the amino acid sequence of SEQ ID NO:1 except that the amino acids from position 585 to 590 of SEQ ID NO:1 are replaced with said amino acid sequence of any one of SEQ ID NOs:K2-K63.

[0921] Embodiment 5K. The vector of Embodiment 1K, wherein said capsid polypeptide comprises the amino acid sequence of SEQ ID NO:1 except that the amino acids from position 585 to 590 of SEQ ID NO:1 are replaced with said amino acid sequence of any one of SEQ ID NOs:K61-K63.

[0922] Embodiment 6K. The vector of any one of Embodiments 1K-5K, wherein said vector is an AAV2 vector.

[0923] Embodiment 7K. The vector of any one of Embodiments 1K-6K, wherein said vector infects greater than 2 percent of OFF-retinal ganglion cells of an eye when a titer of at least 1×10⁷ of said vector is administered intravitreally to said eye.

[0924] Embodiment 8K. The vector of any one of Embodiments 1K-7K, wherein said vector comprises an exogenous nucleic acid encoding an RNA or a polypeptide.

[0925] Embodiment 9K. The vector of Embodiment 8K, wherein said exogenous nucleic acid encodes an RNA.

[0926] Embodiment 10K. The vector of Embodiment 9K, wherein said RNA is an siRNA or microRNA.

[0927] Embodiment 11K. The vector of Embodiment 8K, wherein said exogenous nucleic acid encodes a polypeptide.

[0928] Embodiment 12K. The vector of Embodiment 11K, wherein said polypeptide is an ABCA4 polypeptide, a CRB1 polypeptide, an NPHP5 polypeptide, or an NR2E3 polypeptide.

[0929] Embodiment 13K. The vector of any one of Embodiments 1K-12K, wherein said vector expresses more nucleic acid in OFF-retinal ganglion cells than the level of expression from a comparable AAV vector comprising a capsid polypeptide consisting of the amino acid sequence set forth in SEQ ID NO:1.

[0930] Embodiment 14K. An AAV capsid polypeptide comprising the amino acid sequence of any one of SEQ ID NOs:K2-K63.

[0931] Embodiment 15K. The polypeptide of Embodiment 14K, wherein said polypeptide comprises the amino acid sequence of SEQ ID NO:1 except that said amino acid sequence of any one of SEQ ID NOs:K2-K63 is located between amino acid positions 587 and 588 of SEQ ID NO:1.

[0932] Embodiment 16K. The polypeptide of Embodiment 14K, wherein said polypeptide comprises the amino acid sequence of SEQ ID NO:1 except that said amino acid sequence of any one of SEQ ID NOs:K2-K60 is located between amino acid positions 587 and 588 of SEQ ID NO:1.

[0933] Embodiment 17K. The polypeptide of Embodiment 14K, wherein said polypeptide comprises the amino acid sequence of SEQ ID NO:1 except that the amino acids from position 585 to 590 of SEQ ID NO:1 are replaced with said amino acid sequence of any one of SEQ ID NOs:K2-K63.

[0934] Embodiment 18K. The polypeptide of Embodiment 14K, wherein said polypeptide comprises the amino acid sequence of SEQ ID NO:1 except that the amino acids from position 585 to 590 of SEQ ID NO:1 are replaced with said amino acid sequence of any one of SEQ ID NOs:K61-K63.

[0935] Embodiment 19K. The polypeptide of any one of Embodiments 14K-18K, wherein an AAV vector comprising said polypeptide infects greater than 2 percent of OFF-retinal ganglion cells of an eye when a titer of at least 1×10⁷ of said vector is administered intravitreally to said eye.

[0936] Embodiment 20K. The polypeptide of any one of Embodiments 14K-19K, wherein an AAV vector comprising said polypeptide expresses more nucleic acid in OFF-retinal ganglion cells than the level of expression from a comparable AAV vector comprising a capsid polypeptide consisting of the amino acid sequence set forth in SEQ ID NO:1.

[0937] Embodiment 21K. A nucleic acid molecule encoding a vector of any one of Embodiments 1K-13K or a polypeptide of any one of Embodiments 14K-20K.

[0938] Embodiment 22K. The nucleic acid molecule of Embodiment 21K, wherein said nucleic acid molecule is DNA.

[0939] Embodiment 23K. A host cell comprising a nucleic acid molecule of any one of Embodiments 21K-22K.

[0940] Embodiment 24K. The host cell of Embodiment 23K, wherein said host cell expresses said vector.

[0941] Embodiment 25K. The host cell of Embodiment 23K, wherein said host cell expresses said polypeptide.

[0942] Embodiment 26K. A host cell comprising a vector of any one of Embodiments 1K-13K or a polypeptide of any one of Embodiments 14K-20K.

[0943] Embodiment 27K. The host cell of any one of Embodiments 23K-26K, wherein said host cell is a retinal cell.

[0944] Embodiment 28K. A composition comprising a vector of any one of Embodiments 1K-13K.

[0945] Embodiment 29K. The composition of Embodiment 28K, wherein said composition comprises from about 1×10⁷ to about 1×10¹⁴ of said vector.

[0946] Embodiment 30K. The composition of any one of Embodiments 28K-29K, wherein said composition comprises phosphate buffered saline, Hank's Balanced Salt Solution, or Pluronic F68.

[0947] Embodiment 31K. A method for delivering an exogenous nucleic acid sequence to an OFF-retinal ganglion cell within a mammal, wherein said method comprises contacting said OFF-retinal ganglion cell with an AAV vector comprising an AAV capsid polypeptide and said exogenous nucleic acid sequence, wherein said capsid polypeptide comprises the amino acid sequence of any one of SEQ ID NOs:K2-K63, wherein said AAV vector infects said OFF-retinal ganglion cell, thereby delivering said exogenous nucleic acid sequence to said OFF-retinal ganglion cell.

[0948] Embodiment 32K. The method of Embodiment 31K, wherein said capsid polypeptide comprises the amino acid sequence of SEQ ID NO:1 except that said amino acid sequence of any one of SEQ ID NOs:K2-K63 is located between amino acid positions 587 and 588 of SEQ ID NO:1.

[0949] Embodiment 33K. The method of Embodiment 31K, wherein said capsid polypeptide comprises the amino acid sequence of SEQ ID NO:1 except that said amino acid sequence of any one of SEQ ID NOs:K2-K60 is located between amino acid positions 587 and 588 of SEQ ID NO:1.

[0950] Embodiment 34K. The method of Embodiment 31K, wherein said capsid polypeptide comprises the amino acid sequence of SEQ ID NO:1 except that the amino acids from position 585 to 590 of SEQ ID NO:1 are replaced with said amino acid sequence of any one of SEQ ID NOs:K2-K63.

[0951] Embodiment 35K. The method of Embodiment 31K, wherein said capsid polypeptide comprises the amino acid sequence of SEQ ID NO:1 except that the amino acids from position 585 to 590 of SEQ ID NO:1 are replaced with said amino acid sequence of any one of SEQ ID NOs:K61-K63.

[0952] Embodiment 36K. The method of any one of Embodiments 31K-35K, wherein said mammal is a human.

[0953] Embodiment 37K. The method of any one of Embodiments 31K-36K, wherein said vector is an AAV2 vector.

[0954] Embodiment 38K. The method of any one of Embodiments 31K-37K, wherein said vector infects greater than 2 percent of OFF-retinal ganglion cells of an eye when a titer of at least 1×10⁷ of said vector is administered intravitreally to said eye.

[0955] Embodiment 39K. The method of any one of Embodiments 31K-38K, wherein said exogenous nucleic acid sequence encodes an RNA or a polypeptide.

[0956] Embodiment 40K. The method of Embodiment 39K, wherein said exogenous nucleic acid encodes an RNA.

[0957] Embodiment 41K. The method of Embodiment 40K, wherein said RNA is an siRNA or microRNA.

[0958] Embodiment 42K. The method of Embodiment 39K, wherein said exogenous nucleic acid encodes a polypeptide.

[0959] Embodiment 43K. The method of Embodiment 42K, wherein said polypeptide is an ABCA4 polypeptide, a CRB1 polypeptide, an NPHP5 polypeptide, or an NR2E3 polypeptide.

[0960] Embodiment 44K. The method of any one of Embodiments 31K-43K, wherein said vector expresses more of said exogenous nucleic acid sequence in said OFF-retinal ganglion cell than the level of expression in an OFF-retinal ganglion cell from a comparable AAV vector comprising a capsid polypeptide consisting of the amino acid sequence set forth in SEQ ID NO:1.

[0961] Embodiment 45K. The method of any one of Embodiments 31K-44K, wherein said method comprises intravitreally administering a composition comprising said vector to said mammal, thereby contacting said OFF-retinal ganglion cell with said vector.

[0962] Embodiment 46K. The method of Embodiment 45K, wherein said composition comprises from about 1×10⁷ to about 1×10¹⁴ of said vector.

[0963] Embodiment 47K. A method for treating a retinal condition, wherein said method comprises contacting OFF-retinal ganglion cells of a mammal having said retinal condition with AAV vectors comprising an AAV capsid polypeptide and an exogenous nucleic acid sequence, wherein said capsid polypeptide comprises the amino acid sequence of any one of SEQ ID NOs:K2-K63, wherein said AAV vectors infect said OFF-retinal ganglion cells and drive expression of said exogenous nucleic acid sequence within said OFF-retinal ganglion cells, thereby treating said retinal condition.

[0964] Embodiment 48K. The method of Embodiment 47K, wherein said mammal is a human.

[0965] Embodiment 49K. The method of any one of Embodiments 47K-48K, wherein said retinal condition is selected from the group consisting of cone dystrophy, cone/rod dystrophy, retinitis pigmentosa, macular degeneration, achromatopsia, blue cone monochromcy, and color blindness.

[0966] Embodiment 50K. The method of any one of Embodiments 47K-49K, wherein said capsid polypeptide comprises the amino acid sequence of SEQ ID NO:1 except that said amino acid sequence of any one of SEQ ID NOs:K2-K63 is located between amino acid positions 587 and 588 of SEQ ID NO:1.

[0967] Embodiment 51K. The method of any one of Embodiments 47K-49K, wherein said capsid polypeptide comprises the amino acid sequence of SEQ ID NO:1 except that said amino acid sequence of any one of SEQ ID NOs:K2-K60 is located between amino acid positions 587 and 588 of SEQ ID NO:1.

[0968] Embodiment 52K. The method of any one of Embodiments 47K-49K, wherein said capsid polypeptide comprises the amino acid sequence of SEQ ID NO:1 except that the amino acids from position 585 to 590 of SEQ ID NO:1 are replaced with said amino acid sequence of any one of SEQ ID NOs:K2-K63.

[0969] Embodiment 53K. The method of any one of Embodiments 47K-49K, wherein said capsid polypeptide comprises the amino acid sequence of SEQ ID NO:1 except that the amino acids from position 585 to 590 of SEQ ID NO:1 are replaced with said amino acid sequence of any one of SEQ ID NOs:K61-K63.

[0970] Embodiment 54K. The method of any one of Embodiments 47K-53K, wherein said vectors are AAV2 vectors.

[0971] Embodiment 55K. The method of any one of Embodiments 47K-54K, wherein said vectors infect greater than 2 percent of OFF-retinal ganglion cells when a titer of at least 1×10⁷ of said vectors is administered intravitreally to an eye of said mammal.

[0972] Embodiment 56K. The method of any one of Embodiments 47K-55K, wherein said exogenous nucleic acid sequence encodes an RNA.

[0973] Embodiment 57K. The method of Embodiment 56K, wherein said RNA is an siRNA or microRNA.

[0974] Embodiment 58K. The method of any one of Embodiments 47K-55K, wherein said exogenous nucleic acid encodes a polypeptide.

[0975] Embodiment 59K. The method of Embodiment 58K, wherein said polypeptide is an ABCA4 polypeptide, a CRB1 polypeptide, an NPHP5 polypeptide, or an NR2E3 polypeptide.

[0976] Embodiment 60K. The method of any one of Embodiments 47K-59K, wherein said vectors express more of said exogenous nucleic acid sequence in said OFF-retinal ganglion cells than the level of expression in OFF-retinal ganglion cells from a comparable AAV vector comprising a capsid polypeptide consisting of the amino acid sequence set forth in SEQ ID NO:1.

[0977] Embodiment 61K. The method of any one of Embodiments 47K-60K, wherein said method comprises intravitreally administering a composition comprising said vectors to said mammal, thereby contacting said OFF-retinal ganglion cells with said vectors.

[0978] Embodiment 62K. The method of Embodiment 61K, wherein said composition comprises from about 1×10⁷ to about 1×10¹⁴ of said vector.

[0979] Embodiment 1L. An adeno-associated virus (AAV) vector comprising an AAV capsid polypeptide, wherein said capsid polypeptide comprises the amino acid sequence of any one of SEQ ID NOs:L2-L27.

[0980] Embodiment 2L. The vector of Embodiment 1L, wherein said capsid polypeptide comprises the amino acid sequence of SEQ ID NO:1 except that said amino acid sequence of any one of SEQ ID NOs:L2-L27 is located between amino acid positions 587 and 588 of SEQ ID NO: 1.

[0981] Embodiment 3L. The vector of Embodiment 1L, wherein said capsid polypeptide comprises the amino acid sequence of SEQ ID NO:1 except that said amino acid sequence of any one of SEQ ID NOs:L2-L19 is located between amino acid positions 587 and 588 of SEQ ID NO: 1.

[0982] Embodiment 4L. The vector of Embodiment 1L, wherein said capsid polypeptide comprises the amino acid sequence of SEQ ID NO:1 except that the amino acids from position 585 to 590 of SEQ ID NO:1 are replaced with said amino acid sequence of any one of SEQ ID NOs:L2-L27.

[0983] Embodiment 5L. The vector of Embodiment 1L, wherein said capsid polypeptide comprises the amino acid sequence of SEQ ID NO:1 except that the amino acids from position 585 to 590 of SEQ ID NO:1 are replaced with said amino acid sequence of any one of SEQ ID NOs:L20-L27.

[0984] Embodiment 6L. The vector of any one of Embodiments 1L-5L, wherein said vector is an AAV2 vector.

[0985] Embodiment 7L. The vector of any one of Embodiments 1L-6L, wherein said vector has a packaging efficiency greater than that of a comparable AAV vector comprising a capsid polypeptide consisting of the amino acid sequence set forth in SEQ ID NO:1.

[0986] Embodiment 8L. The vector of any one of Embodiments 1L-7L, wherein said vector comprises an exogenous nucleic acid encoding an RNA or a polypeptide.

[0987] Embodiment 9L. The vector of Embodiment 8L, wherein said exogenous nucleic acid encodes an RNA.

[0988] Embodiment 10L. The vector of Embodiment 9L, wherein said RNA is an siRNA or microRNA.

[0989] Embodiment 11L. The vector of Embodiment 8L, wherein said exogenous nucleic acid encodes a polypeptide.

[0990] Embodiment 12L. The vector of Embodiment 11L, wherein said polypeptide is an ABCA4 polypeptide, a CRB1 polypeptide, an NPHP5 polypeptide, or an NR2E3 polypeptide.

[0991] Embodiment 13L. The vector of any one of Embodiments 1L-12L, wherein said vector has a packaging efficiency at least 10 percent greater than that of a comparable AAV vector comprising a capsid polypeptide consisting of the amino acid sequence set forth in SEQ ID NO:1.

[0992] Embodiment 14L. An AAV capsid polypeptide comprising the amino acid sequence of any one of SEQ ID NOs:L2-L27.

[0993] Embodiment 15L. The polypeptide of Embodiment 14L, wherein said polypeptide comprises the amino acid sequence of SEQ ID NO:1 except that said amino acid sequence of any one of SEQ ID NOs:L2-L27 is located between amino acid positions 587 and 588 of SEQ ID NO: 1.

[0994] Embodiment 16L. The polypeptide of Embodiment 14L, wherein said polypeptide comprises the amino acid sequence of SEQ ID NO:1 except that said amino acid sequence of any one of SEQ ID NOs:L2-L19 is located between amino acid positions 587 and 588 of SEQ ID NO: 1.

[0995] Embodiment 17L. The polypeptide of Embodiment 14L, wherein said polypeptide comprises the amino acid sequence of SEQ ID NO:1 except that the amino acids from position 585 to 590 of SEQ ID NO:1 are replaced with said amino acid sequence of any one of SEQ ID NOs:L2-L27.

[0996] Embodiment 18L. The polypeptide of Embodiment 14L, wherein said polypeptide comprises the amino acid sequence of SEQ ID NO:1 except that the amino acids from position 585 to 590 of SEQ ID NO:1 are replaced with said amino acid sequence of any one of SEQ ID NOs:L20-L27.

[0997] Embodiment 19L. The polypeptide of any one of Embodiments 14L-18L, wherein said vector has a packaging efficiency greater than that of a comparable AAV vector comprising a capsid polypeptide consisting of the amino acid sequence set forth in SEQ ID NO:1.

[0998] Embodiment 20L. The polypeptide of any one of Embodiments 14L-19L, wherein said vector has a packaging efficiency at least 10 percent greater than that of a comparable AAV vector comprising a capsid polypeptide consisting of the amino acid sequence set forth in SEQ ID NO:1.

[0999] Embodiment 21L. A nucleic acid molecule encoding a vector of any one of Embodiments 1L-13L or a polypeptide of any one of Embodiments 14L-20L.

[1000] Embodiment 22L. The nucleic acid molecule of Embodiment 21L, wherein said nucleic acid molecule is DNA.

[1001] Embodiment 23L. A host cell comprising a nucleic acid molecule of any one of Embodiments 21L-22L.

[1002] Embodiment 24L. The host cell of Embodiment 23L, wherein said host cell expresses said vector.

[1003] Embodiment 25L. The host cell of Embodiment 23L, wherein said host cell expresses said polypeptide.

[1004] Embodiment 26L. A host cell comprising a vector of any one of Embodiments 1L-13L or a polypeptide of any one of Embodiments 14L-20L.

[1005] Embodiment 27L. The host cell of any one of Embodiments 23L-26L, wherein said host cell is a retinal cell.

[1006] Embodiment 28L. A composition comprising a vector of any one of Embodiments 1L-13L.

[1007] Embodiment 29L. The composition of Embodiment 28L, wherein said composition comprises from about 1×10⁷ to about 1×10¹⁴ of said vector.

[1008] Embodiment 30L. The composition of any one of Embodiments 28L-29L, wherein said composition comprises phosphate buffered saline, Hank's Balanced Salt Solution, or Pluronic F68.

[1009] Embodiment 31L. A method for delivering an exogenous nucleic acid sequence to a cell within a mammal, wherein said method comprises contacting said cell with an AAV vector comprising an AAV capsid polypeptide and said exogenous nucleic acid sequence, wherein said capsid polypeptide comprises the amino acid sequence of any one of SEQ ID NOs:L2-L27, wherein said AAV vector infects said cell, thereby delivering said exogenous nucleic acid sequence to said cell.

[1010] Embodiment 32L. The method of Embodiment 31L, wherein said capsid polypeptide comprises the amino acid sequence of SEQ ID NO:1 except that said amino acid sequence of any one of SEQ ID NOs:L2-L27 is located between amino acid positions 587 and 588 of SEQ ID NO:1.

[1011] Embodiment 33L. The method of Embodiment 31L, wherein said capsid polypeptide comprises the amino acid sequence of SEQ ID NO:1 except that said amino acid sequence of any one of SEQ ID NOs:L2-L19 is located between amino acid positions 587 and 588 of SEQ ID NO:1.

[1012] Embodiment 34L. The method of Embodiment 31L, wherein said capsid polypeptide comprises the amino acid sequence of SEQ ID NO:1 except that the amino acids from position 585 to 590 of SEQ ID NO:1 are replaced with said amino acid sequence of any one of SEQ ID NOs:L2-L27.

[1013] Embodiment 35L. The method of Embodiment 31L, wherein said capsid polypeptide comprises the amino acid sequence of SEQ ID NO:1 except that the amino acids from position 585 to 590 of SEQ ID NO:1 are replaced with said amino acid sequence of any one of SEQ ID NOs:L20-L27.

[1014] Embodiment 36L. The method of any one of Embodiments 31L-35L, wherein said mammal is a human.

[1015] Embodiment 37L. The method of any one of Embodiments 31L-36L, wherein said vector is an AAV2 vector.

[1016] Embodiment 38L. The method of any one of Embodiments 31L-37L, wherein said vector has a packaging efficiency greater than that of a comparable AAV vector comprising a capsid polypeptide consisting of the amino acid sequence set forth in SEQ ID NO:1.

[1017] Embodiment 39L. The method of any one of Embodiments 31L-38L, wherein said exogenous nucleic acid sequence encodes an RNA or a polypeptide.

[1018] Embodiment 40L. The method of Embodiment 39L, wherein said exogenous nucleic acid encodes an RNA.

[1019] Embodiment 41L. The method of Embodiment 40L, wherein said RNA is an siRNA or microRNA.

[1020] Embodiment 42L. The method of Embodiment 39L, wherein said exogenous nucleic acid encodes a polypeptide.

[1021] Embodiment 43L. The method of Embodiment 42L, wherein said polypeptide is an ABCA4 polypeptide, a CRB1 polypeptide, an NPHP5 polypeptide, or an NR2E3 polypeptide.

[1022] Embodiment 44L. The method of any one of Embodiments 31L-43L, wherein said vector has a packaging efficiency at least 10 percent greater than that of a comparable AAV vector comprising a capsid polypeptide consisting of the amino acid sequence set forth in SEQ ID NO:1.

[1023] Embodiment 45L. The method of any one of Embodiments 31L-44L, wherein said method comprises intravitreally administering a composition comprising said vector to said mammal, thereby contacting said cell with said vector.

[1024] Embodiment 46L. The method of Embodiment 45L, wherein said composition comprises from about 1×10⁷ to about 1×10¹⁴ of said vector.

[1025] Embodiment 47L. A method for treating a retinal condition, wherein said method comprises contacting retinal cells of a mammal having said retinal condition with AAV vectors comprising an AAV capsid polypeptide and an exogenous nucleic acid sequence, wherein said capsid polypeptide comprises the amino acid sequence of any one of SEQ ID NOs:L2-L27, wherein said AAV vectors infect said retinal cells and drive expression of said exogenous nucleic acid sequence within said retinal cells, thereby treating said retinal condition.

[1026] Embodiment 48L. The method of Embodiment 47L, wherein said mammal is a human.

[1027] Embodiment 49L. The method of any one of Embodiments 47L-48L, wherein said retinal condition is selected from the group consisting of cone dystrophy, cone/rod dystrophy, retinitis pigmentosa, macular degeneration, achromatopsia, blue cone monochromcy, and color blindness.

[1028] Embodiment 50L. The method of any one of Embodiments 47L-49L, wherein said capsid polypeptide comprises the amino acid sequence of SEQ ID NO:1 except that said amino acid sequence of any one of SEQ ID NOs:L2-L27 is located between amino acid positions 587 and 588 of SEQ ID NO:1.

[1029] Embodiment 51L. The method of any one of Embodiments 47L-49L, wherein said capsid polypeptide comprises the amino acid sequence of SEQ ID NO:1 except that said amino acid sequence of any one of SEQ ID NOs:L2-L19 is located between amino acid positions 587 and 588 of SEQ ID NO:1.

[1030] Embodiment 52L. The method of any one of Embodiments 47L-49L, wherein said capsid polypeptide comprises the amino acid sequence of SEQ ID NO:1 except that the amino acids from position 585 to 590 of SEQ ID NO:1 are replaced with said amino acid sequence of any one of SEQ ID NOs:L2-L27.

[1031] Embodiment 53L. The method of any one of Embodiments 47L-49L, wherein said capsid polypeptide comprises the amino acid sequence of SEQ ID NO:1 except that the amino acids from position 585 to 590 of SEQ ID NO:1 are replaced with said amino acid sequence of any one of SEQ ID NOs:L19-L27.

[1032] Embodiment 54L. The method of any one of Embodiments 47L-53L, wherein said vectors are AAV2 vectors.

[1033] Embodiment 55L. The method of any one of Embodiments 47L-54L, wherein said vector has a packaging efficiency greater than that of a comparable AAV vector comprising a capsid polypeptide consisting of the amino acid sequence set forth in SEQ ID NO:1.

[1034] Embodiment 56L. The method of any one of Embodiments 47L-55L, wherein said exogenous nucleic acid sequence encodes an RNA.

[1035] Embodiment 57L. The method of Embodiment 56L, wherein said RNA is an siRNA or microRNA.

[1036] Embodiment 58L. The method of any one of Embodiments 47L-55L, wherein said exogenous nucleic acid encodes a polypeptide.

[1037] Embodiment 59L. The method of Embodiment 58L, wherein said polypeptide is an ABCA4 polypeptide, a CRB1 polypeptide, an NPHP5 polypeptide, or an NR2E3 polypeptide.

[1038] Embodiment 60L. The method of any one of Embodiments 47L-59L, wherein said vector has a packaging efficiency at least 10 percent greater than that of a comparable AAV vector comprising a capsid polypeptide consisting of the amino acid sequence set forth in SEQ ID NO:1.

[1039] Embodiment 61L. The method of any one of Embodiments 47L-60L, wherein said method comprises intravitreally administering a composition comprising said vectors to said mammal, thereby contacting said retinal cells with said vectors.

[1040] Embodiment 62L. The method of Embodiment 61L, wherein said composition comprises from about 1×10⁷ to about 1×10¹⁴ of said vector.

[1041] Embodiment 1M. An adeno-associated virus (AAV) vector comprising an AAV capsid polypeptide, wherein said capsid polypeptide comprises the amino acid sequence of any one of SEQ ID NOs:A2-A19, SEQ ID NOs:B2-B317, SEQ ID NOs:C2-C45, SEQ ID NOs:D2-D78, SEQ ID NOs:E2-E83, SEQ ID NOs:F2-F10, SEQ ID NOs:G2-G77, SEQ ID NOs:H2-H258, SEQ ID NOs:I2-I74, SEQ ID NOs:J2-J64, SEQ ID NOs:K2-K63, and SEQ ID NOs:L2-L27.

[1042] Embodiment 2M. The vector of Embodiment 1M, wherein said capsid polypeptide comprises the amino acid sequence of SEQ ID NO:1 except that said amino acid sequence of any one of SEQ ID NOs: A2-A19, SEQ ID NOs:B2-B317, SEQ ID NOs:C2-C45, SEQ ID NOs:D2-D78, SEQ ID NOs:E2-E83, SEQ ID NOs:F2-F10, SEQ ID NOs:G2-G77, SEQ ID NOs:H2-H258, SEQ ID NOs:I2-174, SEQ ID NOs:J2-J64, SEQ ID NOs:K2-K63, and SEQ ID NOs:L2-L27 is located between amino acid positions 587 and 588 of SEQ ID NO: 1.

[1043] Embodiment 3M. The vector of Embodiment 1M, wherein said capsid polypeptide comprises the amino acid sequence of SEQ ID NO:1 except that said amino acid sequence of any one of SEQ ID NOs:A2-A18, SEQ ID NOs:B2-B298, SEQ ID NOs:C2-C43, SEQ ID NOs:D2-D76, SEQ ID NOs:E2-E75, SEQ ID NOs:F2-F10, SEQ ID NOs:G2-G70, SEQ ID NOs:H2-H243, SEQ ID NOs:I2-167, SEQ ID NOs:J2-J61, SEQ ID NOs:K2-K60, and SEQ ID NOs:L2-L19 is located between amino acid positions 587 and 588 of SEQ ID NO: 1.

[1044] Embodiment 4M. The vector of Embodiment 1M, wherein said capsid polypeptide comprises the amino acid sequence of SEQ ID NO:1 except that the amino acids from position 585 to 590 of SEQ ID NO:1 are replaced with said amino acid sequence of any one of SEQ ID NOs:A2-A19, SEQ ID NOs:B2-B317, SEQ ID NOs:C2-C45, SEQ ID NOs:D2-D78, SEQ ID NOs:E2-E83, SEQ ID NOs:F2-F10, SEQ ID NOs:G2-G77, SEQ ID NOs:H2-H258, SEQ ID NOs:I2-I74, SEQ ID NOs:J2-J64, SEQ ID NOs:K2-K63, and SEQ ID NOs:L2-L27.

[1045] Embodiment 5M. The vector of Embodiment 1M, wherein said capsid polypeptide comprises the amino acid sequence of SEQ ID NO:1 except that the amino acids from position 585 to 590 of SEQ ID NO:1 are replaced with said amino acid sequence set forth in any one of SEQ ID NO:A19, SEQ ID NOs:B299-B317, SEQ ID NOs:C44-C45, SEQ ID NOs:D77-D78, SEQ ID NOs:E76-E83, SEQ ID NOs:F2-F10, SEQ ID NOs:G71-G77, SEQ ID NOs:H243-H258, SEQ ID NOs:I68-I74, SEQ ID NOs:J62-J64, SEQ ID NOs:K61-K63, and SEQ ID NOs:L20-L27.

[1046] Embodiment 6M. The vector of any one of Embodiments 1M-5M, wherein said vector is an AAV2 vector.

[1047] Embodiment 7M. The vector of any one of Embodiments 1M-6M, wherein said vector comprises an exogenous nucleic acid encoding an RNA or a polypeptide.

[1048] Embodiment 8N. The vector of Embodiment 7N, wherein said exogenous nucleic acid encodes an RNA.

[1049] Embodiment 9M. The vector of Embodiment 8M, wherein said RNA is an siRNA or microRNA.

[1050] Embodiment 10M. The vector of Embodiment 7M, wherein said exogenous nucleic acid encodes a polypeptide.

[1051] Embodiment 11M. The vector of Embodiment 10M, wherein said polypeptide is an ABCA4 polypeptide, a CRB1 polypeptide, an NPHP5 polypeptide, or an NR2E3 polypeptide.

[1052] Embodiment 12M. An AAV capsid polypeptide comprising the amino acid sequence of any one of SEQ ID NOs:A2-A19, SEQ ID NOs:B2-B317, SEQ ID NOs:C2-C45, SEQ ID NOs:D2-D78, SEQ ID NOs:E2-E83, SEQ ID NOs:F2-F10, SEQ ID NOs:G2-G77, SEQ ID NOs:H2-H258, SEQ ID NOs:I2-174, SEQ ID NOs:J2-J64, SEQ ID NOs:K2-K63, and SEQ ID NOs:L2-L27.

[1053] Embodiment 13M. The polypeptide of Embodiment 12M, wherein said polypeptide comprises the amino acid sequence of SEQ ID NO:1 except that said amino acid sequence of any one of SEQ ID NOs:A2-A19, SEQ ID NOs:B2-B317, SEQ ID NOs:C2-C45, SEQ ID NOs:D2-D78, SEQ ID NOs:E2-E83, SEQ ID NOs:F2-F10, SEQ ID NOs:G2-G77, SEQ ID NOs:H2-H258, SEQ ID NOs:I2-I74, SEQ ID NOs:J2-J64, SEQ ID NOs:K2-K63, and SEQ ID NOs:L2-L27 is located between amino acid positions 587 and 588 of SEQ ID NO: 1.

[1054] Embodiment 14M. The polypeptide of Embodiment 12M, wherein said polypeptide comprises the amino acid sequence of SEQ ID NO:1 except that said amino acid sequence of any one of SEQ ID NOs:A2-A18, SEQ ID NOs:B2-B298, SEQ ID NOs:C2-C43, SEQ ID NOs:D2-D76, SEQ ID NOs:E2-E75, SEQ ID NOs:F2-F10, SEQ ID NOs:G2-G70, SEQ ID NOs:H2-H243, SEQ ID NOs:I2-167, SEQ ID NOs:J2-J61, SEQ ID NOs:K2-K60, and SEQ ID NOs:L2-L19 is located between amino acid positions 587 and 588 of SEQ ID NO:1.

[1055] Embodiment 15M. The polypeptide of Embodiment 12M, wherein said polypeptide comprises the amino acid sequence of SEQ ID NO:1 except that the amino acids from position 585 to 590 of SEQ ID NO:1 are replaced with said amino acid sequence of any one of SEQ ID NOs:A2-A19, SEQ ID NOs:B2-B317, SEQ ID NOs:C2-C45, SEQ ID NOs:D2-D78, SEQ ID NOs:E2-E83, SEQ ID NOs:F2-F10, SEQ ID NOs:G2-G77, SEQ ID NOs:H2-H258, SEQ ID NOs:I2-I74, SEQ ID NOs:J2-J64, SEQ ID NOs:K2-K63, and SEQ ID NOs:L2-L27.

[1056] Embodiment 16M. The polypeptide of Embodiment 12M, wherein said polypeptide comprises the amino acid sequence of SEQ ID NO:1 except that the amino acids from position 585 to 590 of SEQ ID NO:1 are replaced with said amino acid sequence set forth in any one of SEQ ID NO:A19, SEQ ID NOs:B299-B317, SEQ ID NOs:C44-C45, SEQ ID NOs:D77-D78, SEQ ID NOs:E76-E83, SEQ ID NOs:F2-F10, SEQ ID NOs:G71-G77, SEQ ID NOs:H243-H258, SEQ ID NOs:I68-I74, SEQ ID NOs:J62-J64, SEQ ID NOs:K61-K63, and SEQ ID NOs:L20-L27.

[1057] Embodiment 17M. A nucleic acid molecule encoding a vector of any one of Embodiments 1M-11M or a polypeptide of any one of Embodiments 12M-16M.

[1058] Embodiment 18M. The nucleic acid molecule of Embodiment 17M, wherein said nucleic acid molecule is DNA.

[1059] Embodiment 19M. A host cell comprising a nucleic acid molecule of any one of Embodiments 17M-18M.

[1060] Embodiment 20M. The host cell of Embodiment 19M, wherein said host cell expresses said vector.

[1061] Embodiment 21M. The host cell of Embodiment 20M, wherein said host cell expresses said polypeptide.

[1062] Embodiment 22M. A host cell comprising a vector of any one of Embodiments 1M-11M or a polypeptide of any one of Embodiments 12M-16M.

[1063] Embodiment 23M. The host cell of any one of Embodiments 19M-22M, wherein said host cell is a retinal cell.

[1064] Embodiment 24M. A composition comprising a vector of any one of Embodiments 1M-11M.

[1065] Embodiment 25M. The composition of Embodiment 24M, wherein said composition comprises from about 1×10⁷ to about 1×10¹⁴ of said vector.

[1066] Embodiment 26M. The composition of any one of Embodiments 24M-25M, wherein said composition comprises phosphate buffered saline, Hank's Balanced Salt Solution, or Pluronic F68.

[1067] Embodiment 27M. A method for delivering an exogenous nucleic acid sequence to a retinal cell within a mammal, wherein said method comprises contacting said retinal cell with an AAV vector comprising an AAV capsid polypeptide and said exogenous nucleic acid sequence, wherein said capsid polypeptide comprises the amino acid sequence of any one of SEQ ID NOs:A2-A19, SEQ ID NOs:B2-B317, SEQ ID NOs:C2-C45, SEQ ID NOs:D2-D78, SEQ ID NOs:E2-E83, SEQ ID NOs:F2-F10, SEQ ID NOs:G2-G77, SEQ ID NOs:H2-H258, SEQ ID NOs:I2-I74, SEQ ID NOs:J2-J64, SEQ ID NOs:K2-K63, and SEQ ID NOs:L2-L27, wherein said AAV vector infects said retinal cell, thereby delivering said exogenous nucleic acid sequence to said retinal cell.

[1068] Embodiment 28M. The method of Embodiment 27M, wherein said capsid polypeptide comprises the amino acid sequence of SEQ ID NO:1 except that said amino acid sequence of any one of SEQ ID NOs:A2-A19, SEQ ID NOs:B2-B317, SEQ ID NOs:C2-C45, SEQ ID NOs:D2-D78, SEQ ID NOs:E2-E83, SEQ ID NOs:F2-F10, SEQ ID NOs:G2-G77, SEQ ID NOs:H2-H258, SEQ ID NOs:I2-174, SEQ ID NOs:J2-J64, SEQ ID NOs:K2-K63, and SEQ ID NOs:L2-L27 is located between amino acid positions 587 and 588 of SEQ ID NO: 1.

[1069] Embodiment 29M. The method of Embodiment 27M, wherein said capsid polypeptide comprises the amino acid sequence of SEQ ID NO:1 except that said amino acid sequence of any one of SEQ ID NOs:A2-A18, SEQ ID NOs:B2-B298, SEQ ID NOs:C2-C43, SEQ ID NOs:D2-D76, SEQ ID NOs:E2-E75, SEQ ID NOs:F2-F10, SEQ ID NOs:G2-G70, SEQ ID NOs:H2-H243, SEQ ID NOs:I2-167, SEQ ID NOs:J2-J61, SEQ ID NOs:K2-K60, and SEQ ID NOs:L2-L19 is located between amino acid positions 587 and 588 of SEQ ID NO: 1.

[1070] Embodiment 30M. The method of Embodiment 27M, wherein said capsid polypeptide comprises the amino acid sequence of SEQ ID NO:1 except that the amino acids from position 585 to 590 of SEQ ID NO:1 are replaced with said amino acid sequence of any one of SEQ ID NOs:A2-A19, SEQ ID NOs:B2-B317, SEQ ID NOs:C2-C45, SEQ ID NOs:D2-D78, SEQ ID NOs:E2-E83, SEQ ID NOs:F2-F10, SEQ ID NOs:G2-G77, SEQ ID NOs:H2-H258, SEQ ID NOs:I2-I74, SEQ ID NOs:J2-J64, SEQ ID NOs:K2-K63, and SEQ ID NOs:L2-L27.

[1071] Embodiment 31M. The method of Embodiment 27M, wherein said capsid polypeptide comprises the amino acid sequence of SEQ ID NO:1 except that the amino acids from position 585 to 590 of SEQ ID NO:1 are replaced with said amino acid sequence set forth in any one of SEQ ID NO:A19, SEQ ID NOs:B299-B317, SEQ ID NOs:C44-C45, SEQ ID NOs:D77-D78, SEQ ID NOs:E76-E83, SEQ ID NOs:F2-F10, SEQ ID NOs:G71-G77, SEQ ID NOs:H243-H258, SEQ ID NOs:I68-174, SEQ ID NOs:J62-J64, SEQ ID NOs:K61-K63, and SEQ ID NOs:L20-L27.

[1072] Embodiment 32M. The method of any one of Embodiments 27M-31M, wherein said mammal is a human.

[1073] Embodiment 33M. The method of any one of Embodiments 27M-32M, wherein said vector is an AAV2 vector.

[1074] Embodiment 34M. The method of any one of Embodiments 27M-33M, wherein said exogenous nucleic acid sequence encodes an RNA or a polypeptide.

[1075] Embodiment 35M. The method of Embodiment 34M, wherein said exogenous nucleic acid encodes an RNA.

[1076] Embodiment 36M. The method of Embodiment 35M, wherein said RNA is an siRNA or microRNA.

[1077] Embodiment 37M. The method of Embodiment 34M, wherein said exogenous nucleic acid encodes a polypeptide.

[1078] Embodiment 38M. The method of Embodiment 37M, wherein said polypeptide is an ABCA4 polypeptide, a CRB1 polypeptide, an NPHP5 polypeptide, or an NR2E3 polypeptide.

[1079] Embodiment 39M. The method of any one of Embodiments 27M-38M, wherein said method comprises intravitreally administering a composition comprising said vector to said mammal, thereby contacting said retinal cell with said vector.

[1080] Embodiment 40M. The method of Embodiment 39M, wherein said composition comprises from about 1×10⁷ to about 1×10¹⁴ of said vector.

[1081] Embodiment 41M. A method for treating a retinal condition, wherein said method comprises contacting retinal cells of a mammal having said retinal condition with AAV vectors comprising an AAV capsid polypeptide and an exogenous nucleic acid sequence, wherein said capsid polypeptide comprises the amino acid sequence of any one of SEQ ID NOs:A2-A19, SEQ ID NOs:B2-B317, SEQ ID NOs:C2-C45, SEQ ID NOs:D2-D78, SEQ ID NOs:E2-E83, SEQ ID NOs:F2-F10, SEQ ID NOs:G2-G77, SEQ ID NOs:H2-H258, SEQ ID NOs:I2-I74, SEQ ID NOs:J2-J64, SEQ ID NOs:K2-K63, and SEQ ID NOs:L2-L27, wherein said AAV vectors infect said retinal cells and drive expression of said exogenous nucleic acid sequence within said retinal cells, thereby treating said retinal condition.

[1082] Embodiment 42M. The method of Embodiment 41M, wherein said mammal is a human.

[1083] Embodiment 43M. The method of any one of Embodiments 41M-42M, wherein said retinal condition is selected from the group consisting of cone dystrophy, cone/rod dystrophy, retinitis pigmentosa, macular degeneration, achromatopsia, blue cone monochromcy, and color blindness.

[1084] Embodiment 44M. The method of any one of Embodiments 41M-43M, wherein said capsid polypeptide comprises the amino acid sequence of SEQ ID NO:1 except that said amino acid sequence of any one of SEQ ID NOs:A2-A19, SEQ ID NOs:B2-B317, SEQ ID NOs:C2-C45, SEQ ID NOs:D2-D78, SEQ ID NOs:E2-E83, SEQ ID NOs:F2-F10, SEQ ID NOs:G2-G77, SEQ ID NOs:H2-H258, SEQ ID NOs:I2-I74, SEQ ID NOs:J2-J64, SEQ ID NOs:K2-K63, and SEQ ID NOs:L2-L27 is located between amino acid positions 587 and 588 of SEQ ID NO:1.

[1085] Embodiment 45M. The method of any one of Embodiments 41M-43M, wherein said capsid polypeptide comprises the amino acid sequence of SEQ ID NO:1 except that said amino acid sequence of any one of SEQ ID NOs:A2-A18, SEQ ID NOs:B2-B298, SEQ ID NOs:C2-C43, SEQ ID NOs:D2-D76, SEQ ID NOs:E2-E75, SEQ ID NOs:F2-F10, SEQ ID NOs:G2-G70, SEQ ID NOs:H2-H243, SEQ ID NOs:I2-I67, SEQ ID NOs:J2-J61, SEQ ID NOs:K2-K60, and SEQ ID NOs:L2-L19 is located between amino acid positions 587 and 588 of SEQ ID NO:1.

[1086] Embodiment 46M. The method of any one of Embodiments 41M-43M, wherein said capsid polypeptide comprises the amino acid sequence of SEQ ID NO:1 except that the amino acids from position 585 to 590 of SEQ ID NO:1 are replaced with said amino acid sequence of any one of SEQ ID NOs:A2-A19, SEQ ID NOs:B2-B317, SEQ ID NOs:C2-C45, SEQ ID NOs:D2-D78, SEQ ID NOs:E2-E83, SEQ ID NOs:F2-F10, SEQ ID NOs:G2-G77, SEQ ID NOs:H2-H258, SEQ ID NOs:I2-I74, SEQ ID NOs:J2-J64, SEQ ID NOs:K2-K63, and SEQ ID NOs:L2-L27.

[1087] Embodiment 47M. The method of any one of Embodiments 41M-43M, wherein said capsid polypeptide comprises the amino acid sequence of SEQ ID NO:1 except that the amino acids from position 585 to 590 of SEQ ID NO:1 are replaced with said amino acid sequence set forth in any one of SEQ ID NO:A19, SEQ ID NOs:B299-B317, SEQ ID NOs:C44-C45, SEQ ID NOs:D77-D78, SEQ ID NOs:E76-E83, SEQ ID NOs:F2-F10, SEQ ID NOs:G71-G77, SEQ ID NOs:H243-H258, SEQ ID NOs:I68-174, SEQ ID NOs:J62-J64, SEQ ID NOs:K61-K63, and SEQ ID NOs:L20-L27.

[1088] Embodiment 48M. The method of any one of Embodiments 41M-47M, wherein said vectors are AAV2 vectors.

[1089] Embodiment 49M. The method of any one of Embodiments 41M-48M, wherein said exogenous nucleic acid sequence encodes an RNA.

[1090] Embodiment 50M. The method of Embodiment 49M, wherein said RNA is an siRNA or a microRNA.

[1091] Embodiment 51M. The method of any one of Embodiments 41M-50M, wherein said exogenous nucleic acid encodes a polypeptide.

[1092] Embodiment 52M. The method of Embodiment 51M, wherein said polypeptide is an ABCA4 polypeptide, a CRB1 polypeptide, an NPHP5 polypeptide, and an NR2E3 polypeptide.

[1093] Embodiment 53M. The method of any one of Embodiments 41M-52M, wherein said method comprises intravitreally administering a composition comprising said vectors to said mammal, thereby contacting said retinal cells with said vectors.

[1094] Embodiment 54M. The method of Embodiment 53M, wherein said composition comprises from about 1×10⁷ to about 1×10¹⁴ of said vectors.

### OTHER EMBODIMENTS

[1095] It is to be understood that while the invention has been described in conjunction with the detailed description thereof, the foregoing description is intended to illustrate and not limit the scope of the invention, which is defined by the scope of the appended claims. Other aspects, advantages, and modifications are within the scope of the following claims.

The application's sequence listing, which the Patent Office published only in electronic form, follows.

SEQUENCE LISTING (2209 sequences)

SEQ ID NO: 1 - protein, 735 aa, synthetic construct [sequence omitted]

SEQ ID NO: 2 - protein, 8 aa, synthetic construct
TGYSSTNG

SEQ ID NO: 3 - protein, 9 aa, synthetic construct
LADLSDHHA

SEQ ID NO: 4 - protein, 8 aa, synthetic construct
SGTEATRG

SEQ ID NO: 5 - protein, 8 aa, synthetic construct
TGQDKPTG

SEQ ID NO: 6 - protein, 8 aa, synthetic construct
SSMDPRHG

SEQ ID NO: 7 - protein, 9 aa, synthetic construct
LANLKENEA

SEQ ID NO: 8 - protein, 9 aa, synthetic construct
LAIKMIAYA

SEQ ID NO: 9 - protein, 8 aa, synthetic construct
TGEGPTKG

SEQ ID NO: 10 - protein, 8 aa, synthetic construct
SGSVGYVG

SEQ ID NO: 11 - protein, 9 aa, synthetic construct
LAQVQVEGA

SEQ ID NO: 12 - protein, 8 aa, synthetic construct
SGFDATKG

SEQ ID NO: 13 - protein, 8 aa, synthetic construct
TTDLNHKG

SEQ ID NO: 14 - protein, 8 aa, synthetic construct
SSRAYQET

SEQ ID NO: 15 - protein, 9 aa, synthetic construct
LAKVASMNA

SEQ ID NO: 16 - protein, 8 aa, synthetic construct
TSQEKQNS

SEQ ID NO: 17 - protein, 9 aa, synthetic construct
LAAHQMASA

SEQ ID NO: 18 - protein, 9 aa, synthetic construct
LAKGQAQNA

SEQ ID NO: 19 - protein, 6 aa, synthetic construct
RTGRNT

SEQ ID NO: 20 - protein, 9 aa, synthetic construct
LATTTMGTA

SEQ ID NO: 21 - protein, 9 aa, synthetic construct
LARRKSNEA

SEQ ID NO: 22 - protein, 9 aa, synthetic construct
LAHGGLREA

SEQ ID NO: 23 - protein, 9 aa, synthetic construct
LAMFVWVPA

SEQ ID NO: 24 - protein, 9 aa, synthetic construct
LATDRTKTA

SEQ ID NO: 25 - protein, 9 aa, synthetic construct
LAFNSCSYA

SEQ ID NO: 26 - protein, 9 aa, synthetic construct
LAYAEQSKA

SEQ ID NO: 27 - protein, 9 aa, synthetic construct
LAWRIMKHA

SEQ ID NO: 28 - protein, 9 aa, synthetic construct
LAVDNIWAA

SEQ ID NO: 29 - protein, 9 aa, synthetic construct
LAGQAMMQA

SEQ ID NO: 30 - protein, 9 aa, synthetic construct
LAELALIKA

SEQ ID NO: 31 - protein, 9 aa, synthetic construct
LAMTKITDA

SEQ ID NO: 32 - protein, 9 aa, synthetic construct
LALENIGQA

SEQ ID NO: 33 - protein, 9 aa, synthetic construct
LAFTHGTNA

SEQ ID NO: 34 - protein, 9 aa, synthetic construct
LAKINAQPA

SEQ ID NO: 35 - protein, 9 aa, synthetic construct
LADLSDHHA

SEQ ID NO: 36 - protein, 9 aa, synthetic construct
LADPLYAVA

SEQ ID NO: 37 - protein, 9 aa, synthetic construct
LAYVALFYA

SEQ ID NO: 38 - protein, 9 aa, synthetic construct
LAGGEYETA

SEQ ID NO: 39 - protein, 9 aa, synthetic construct
LAALVDANA

SEQ ID NO: 40 - protein, 9 aa, synthetic construct
LADPTETPA

SEQ ID NO: 41 - protein, 9 aa, synthetic construct
LAHRAPDSA

SEQ ID NO: 42 - protein, 9 aa, synthetic construct
LAEGQEDSA

SEQ ID NO: 43 - protein, 9 aa, synthetic construct
LAEEEKYGA

SEQ ID NO: 44 - protein, 9 aa, synthetic construct
LALNDNVGA

SEQ ID NO: 45 - protein, 9 aa, synthetic construct
LAPDAKDWA

SEQ ID NO: 46 - protein, 9 aa, synthetic construct
LAPHIAKDA

SEQ ID NO: 47 - protein, 9 aa, synthetic construct
LADPGWKYA

SEQ ID NO: 48 - protein, 9 aa, synthetic construct
LASRTAVAA

SEQ ID NO: 49 - protein, 9 aa, synthetic construct
LAFCIKHCA

SEQ ID NO: 50 - protein, 9 aa, synthetic construct
LAEPDHTLA

SEQ ID NO: 51 - protein, 9 aa, synthetic construct
LAPMRGVYA

SEQ ID NO: 52 - protein, 9 aa, synthetic construct
LAAVTKDSA

SEQ ID NO: 53 - protein, 9 aa, synthetic construct
LAITQSDIA

SEQ ID NO: 54 - protein, 9 aa, synthetic construct
LAPNQGTPA

SEQ ID NO: 55 - protein, 9 aa, synthetic construct
LAVMGNMLA

SEQ ID NO: 56 - protein, 9 aa, synthetic construct
LASNMERIA

SEQ ID NO: 57 - protein, 9 aa, synthetic construct
LAHWQEEWA

SEQ ID NO: 58 - protein, 9 aa, synthetic construct
LADDMIFVA

SEQ ID NO: 59 - protein, 9 aa, synthetic construct
LAHEPMFNA

SEQ ID NO: 60 - protein, 9 aa, synthetic construct
LATVYKSPA

SEQ ID NO: 61 - protein, 9 aa, synthetic construct
LADNLNTPA

SEQ ID NO: 62 - protein, 9 aa, synthetic construct
LAYVIENDA

SEQ ID NO: 63 - protein, 9 aa, synthetic construct
LALEVGDHA

SEQ ID NO: 64 - protein, 9 aa, synthetic construct
LAHEGRQAA

SEQ ID NO: 65 - protein, 9 aa, synthetic construct
LASTTMNIA

SEQ ID NO: 66 - protein, 9 aa, synthetic construct
LAEFHIPTA

SEQ ID NO: 67 - protein, 9 aa, synthetic construct
LAEFRVGQA

SEQ ID NO: 68 - protein, 9 aa, synthetic construct
LADAHSVTA

SEQ ID NO: 69 - protein, 9 aa, synthetic construct
LAKPPPKDA

SEQ ID NO: 70 - protein, 9 aa, synthetic construct
LAIGSDTSA

SEQ ID NO: 71 - protein, 9 aa, synthetic construct
LAFQQQRCA

SEQ ID NO: 72 - protein, 9 aa, synthetic construct
LAAVHLMGA

SEQ ID NO: 73 - protein, 9 aa, synthetic construct
LACTYTYAA

SEQ ID NO: 74 - protein, 9 aa, synthetic construct
LAVRNEINA

SEQ ID NO: 75 - protein, 9 aa, synthetic construct
LADSSKWIA

SEQ ID NO: 76 - protein, 9 aa, synthetic construct
LADYRNDKA

SEQ ID NO: 77 - protein, 9 aa, synthetic construct
LANANTRPA

SEQ ID NO: 78 - protein, 9 aa, synthetic construct
LAPQNLDEA

SEQ ID NO: 79 - protein, 9 aa, synthetic construct
LAHPGTTFA

SEQ ID NO: 80 - protein, 9 aa, synthetic construct
LAYDAGGHA

SEQ ID NO: 81 - protein, 9 aa, synthetic construct
LAKALGMEA

SEQ ID NO: 82 - protein, 9 aa, synthetic construct
LAGENHISA

SEQ ID NO: 83 - protein, 9 aa, synthetic construct
LARDQLKLA

SEQ ID NO: 84 - protein, 9 aa, synthetic construct
LACPVAEWA

SEQ ID NO: 85 - protein, 9 aa, synthetic construct
LAQVKQGPA

SEQ ID NO: 86 - protein, 9 aa, synthetic construct
LALPEGRFA

SEQ ID NO: 87 - protein, 9 aa, synthetic construct
LAMNEPVTA

SEQ ID NO: 88 - protein, 9 aa, synthetic construct
LAAVTEYVA

SEQ ID NO: 89 - protein, 9 aa, synthetic construct
LADGGTRPA

SEQ ID NO: 90 - protein, 9 aa, synthetic construct
LAPPGNPLA

SEQ ID NO: 91 - protein, 9 aa, synthetic construct
LANIVQQDA

SEQ ID NO: 92 - protein, 9 aa, synthetic construct
LAVSRHGEA

SEQ ID NO: 93 - protein, 9 aa, synthetic construct
LANEAQGKA

SEQ ID NO: 94 - protein, 9 aa, synthetic construct
LAPMGQNMA

SEQ ID NO: 95 - protein, 9 aa, synthetic construct
LAAYHDSAA

SEQ ID NO: 96 - protein, 9 aa, synthetic construct
LAGIQQHVA

SEQ ID NO: 97 - protein, 9 aa, synthetic construct
LASVSTIQA

SEQ ID NO: 98 - protein, 9 aa, synthetic construct
LAAVGMKMA

SEQ ID NO: 99 - protein, 9 aa, synthetic construct
LAQVTEMRA

SEQ ID NO: 100 - protein, 9 aa, synthetic construct
LADTHTTYA

SEQ ID NO: 101 - protein, 9 aa, synthetic construct
LAIGERTTA

SEQ ID NO: 102 - protein, 9 aa, synthetic construct
LANKNTAIA

SEQ ID NO: 103 - protein, 9 aa, synthetic construct
LANLKENEA

SEQ ID NO: 104 - protein, 9 aa, synthetic construct
LAEYHNNDA

SEQ ID NO: 105 - protein, 9 aa, synthetic construct
LAFNGSTSA

SEQ ID NO: 106 - protein, 9 aa, synthetic construct
LAGFMEYYA

SEQ ID NO: 107 - protein, 9 aa, synthetic construct
LAMGHNYVA

SEQ ID NO: 108 - protein, 9 aa, synthetic construct
LAGEFTGKA

SEQ ID NO: 109 - protein, 9 aa, synthetic construct
LAKGFKTEA

SEQ ID NO: 110 - protein, 9 aa, synthetic construct
LAWNKCPYA

SEQ ID NO: 111 - protein, 9 aa, synthetic construct
LAQEQNAAA

SEQ ID NO: 112 - protein, 9 aa, synthetic construct
LAKDGMIGA

SEQ ID NO: 113 - protein, 9 aa, synthetic construct
LAPTTIGGA

SEQ ID NO: 114 - protein, 9 aa, synthetic construct
LAVKGLVNA

SEQ ID NO: 115 - protein, 9 aa, synthetic construct
LALNSGKMA

SEQ ID NO: 116 - protein, 9 aa, synthetic construct
LALYQCDTA

SEQ ID NO: 117 - protein, 9 aa, synthetic construct
LAPQKQPVA

SEQ ID NO: 118 - protein, 9 aa, synthetic construct
LAEHKNMHA

SEQ ID NO: 119 - protein, 9 aa, synthetic construct
LAEFDGDGA

SEQ ID NO: 120 - protein, 9 aa, synthetic construct
LASRLNSPA

SEQ ID NO: 121 - protein, 9 aa, synthetic construct
LAPCYEPPA

SEQ ID NO: 122 - protein, 9 aa, synthetic construct
LALKLRTEA

SEQ ID NO: 123 - protein, 9 aa, synthetic construct
LAAGQAQSA

SEQ ID NO: 124 - protein, 9 aa, synthetic construct
LATPNVNAA

SEQ ID NO: 125 - protein, 9 aa, synthetic construct
LARAITNEA

SEQ ID NO: 126 - protein, 9 aa, synthetic construct
LAEVTYTGA

SEQ ID NO: 127 - protein, 9 aa, synthetic construct
LAPSGDRHA

SEQ ID NO: 128 - protein, 9 aa, synthetic construct
LAYITEKSA

SEQ ID NO: 129 - protein, 9 aa, synthetic construct
LAKDHHVIA

SEQ ID NO: 130 - protein, 9 aa, synthetic construct
LASADHQPA

SEQ ID NO: 131 - protein, 9 aa, synthetic construct
LATMHNFEA

SEQ ID NO: 132 - protein, 9 aa, synthetic construct
LARGVAPIA

SEQ ID NO: 133 - protein, 9 aa, synthetic construct
LAWKCKGTA

SEQ ID NO: 134 - protein, 9 aa, synthetic construct
LAKGILMEA

SEQ ID NO: 135 - protein, 9 aa, synthetic construct
LANIVSHDA

SEQ ID NO: 136 - protein, 9 aa, synthetic construct
LAEFVHKGA

SEQ ID NO: 137 - protein, 9 aa, synthetic construct
LASAVMYWA

SEQ ID NO: 138 - protein, 9 aa, synthetic construct
LAQKKLLEA

SEQ ID NO: 139 - protein, 9 aa, synthetic construct
LAGERETVA

SEQ ID NO: 140 - protein, 9 aa, synthetic construct
LAFLRGPEA

SEQ ID NO: 141 - protein, 9 aa, synthetic construct
LAAVGVGYA

SEQ ID NO: 142 - protein, 9 aa, synthetic construct
LADLGYPNA

SEQ ID NO: 143 - protein, 9 aa, synthetic construct
LAAKPKDGA

SEQ ID NO: 144 - protein, 9 aa, synthetic construct
LADKNRLQA

SEQ ID NO: 145 - protein, 9 aa, synthetic construct
LADMTRFHA

SEQ ID NO: 146 - protein, 9 aa, synthetic construct
LARSSTLNA

SEQ ID NO: 147 - protein, 9 aa, synthetic construct
LACYPPTCA

SEQ ID NO: 148 - protein, 9 aa, synthetic construct
LAKVSKGDA

SEQ ID NO: 149 - protein, 9 aa, synthetic construct
LAGGKQALA

SEQ ID NO: 150 - protein, 9 aa, synthetic construct
LADIVGESA

SEQ ID NO: 151 - protein, 9 aa, synthetic construct
LADFPSEKA

SEQ ID NO: 152 - protein, 9 aa, synthetic construct
LAHIQEPKA

SEQ ID NO: 153 - protein, 9 aa, synthetic construct
LAAANHDNA

SEQ ID NO: 154 - protein, 9 aa, synthetic construct
LAALNSQTA

SEQ ID NO: 155 - protein, 9 aa, synthetic construct
LAEPFPVAA

SEQ ID NO: 156 - protein, 9 aa, synthetic construct
LAELDFKWA

SEQ ID NO: 157 - protein, 9 aa, synthetic construct
LAKFMWIHA

SEQ ID NO: 158 - protein, 9 aa, synthetic construct
LAQVQVEGA

SEQ ID NO: 159 - protein, 9 aa, synthetic construct
LADILVGQA

SEQ ID NO: 160 - protein, 9 aa, synthetic construct
LAQWFLWRA

SEQ ID NO: 161 - protein, 9 aa, synthetic construct
LALHQERQA

SEQ ID NO: 162 - protein, 9 aa, synthetic construct
LACSSTWYA

SEQ ID NO: 163 - protein, 9 aa, synthetic construct
LAGSMAKLA

SEQ ID NO: 164 - protein, 9 aa, synthetic construct
LAPNTPKIA

SEQ ID NO: 165 - protein, 9 aa, synthetic construct
LALDMWEPA

SEQ ID NO: 166 - protein, 9 aa, synthetic construct
LAGHAACFA

SEQ ID NO: 167 - protein, 9 aa, synthetic construct
LAVRTGSMA

SEQ ID NO: 168 - protein, 9 aa, synthetic construct
LAGVVKTDA

SEQ ID NO: 169 - protein, 9 aa, synthetic construct
LAKFAAKDA

SEQ ID NO: 170 - protein, 9 aa, synthetic construct
LAVNRVDMA

SEQ ID NO: 171 - protein, 9 aa, synthetic construct
LANNAEPSA

SEQ ID NO: 172 - protein, 9 aa, synthetic construct
LAAKMYNGA

SEQ ID NO: 173 - protein, 9 aa, synthetic construct
LAEADKWYA

SEQ ID NO: 174 - protein, 9 aa, synthetic construct
LARGTLMTA

SEQ ID NO: 175 - protein, 9 aa, synthetic construct
LAKDKGLIA

SEQ ID NO: 176 - protein, 9 aa, synthetic construct
LAQGNNTGA

SEQ ID NO: 177 - protein, 9 aa, synthetic construct
LAWIERSMA

SEQ ID NO: 178 - protein, 9 aa, synthetic construct
LAYDNTAEA

SEQ ID NO: 179 - protein, 9 aa, synthetic construct
LAGFHAIEA

SEQ ID NO: 180 - protein, 9 aa, synthetic construct
LAFGFSADA

SEQ ID NO: 181 - protein, 9 aa, synthetic construct
LAEGMTGIA

SEQ ID NO: 182 - protein, 9 aa, synthetic construct
LAHDLHGGA

SEQ ID NO: 183 - protein, 9 aa, synthetic construct
LAQAGDTAA

SEQ ID NO: 184 - protein, 9 aa, synthetic construct
LAGEVTKHA

SEQ ID NO: 185 - protein, 9 aa, synthetic construct
LALNAAATA

SEQ ID NO: 186 - protein, 9 aa, synthetic construct
LADCMMINA

SEQ ID NO: 187 - protein, 9 aa, synthetic construct
LAYFHSYAA

SEQ ID NO: 188 - protein, 9 aa, synthetic construct
LAISQPNPA

SEQ ID NO: 189 - protein, 9 aa, synthetic construct
LAVAVDCFA

SEQ ID NO: 190 - protein, 9 aa, synthetic construct
LADHGNKPA

SEQ ID NO: 191 - protein, 9 aa, synthetic construct
LAAEHIGRA

SEQ ID NO: 192 - protein, 9 aa, synthetic construct
LAVTPPWYA

SEQ ID NO: 193 - protein, 9 aa, synthetic construct
LAVPKADAA

SEQ ID NO: 194 - protein, 9 aa, synthetic construct
LANMMAAGA

SEQ ID NO: 195 - protein, 9 aa, synthetic construct
LANVTLQSA

SEQ ID NO: 196 - protein, 9 aa, synthetic construct
LAPIQLAQA

SEQ ID NO: 197 - protein, 9 aa, synthetic construct
LANQGFLTA

SEQ ID NO: 198 - protein, 9 aa, synthetic construct
LAPLQTQEA

SEQ ID NO: 199 - protein, 9 aa, synthetic construct
LAEQVLEKA

SEQ ID NO: 200 - protein, 9 aa, synthetic construct
LAVDIMRGA

SEQ ID NO: 201 - protein, 9 aa, synthetic construct
LACTFKPNA

SEQ ID NO: 202 - protein, 9 aa, synthetic construct
LATWCLVWA

SEQ ID NO: 203 - protein, 9 aa, synthetic construct
LAKSAGILA

SEQ ID NO: 204 - protein, 9 aa, synthetic construct
LAYGQQTTA

SEQ ID NO: 205 - protein, 9 aa, synthetic construct
LAHAGSSSA

SEQ ID NO: 206 - protein, 9 aa, synthetic construct
LAGKTISGA

SEQ ID NO: 207 - protein, 9 aa, synthetic construct
LASIGFSAA

SEQ ID NO: 208 - protein, 9 aa, synthetic construct
LAFPCIKEA

SEQ ID NO: 209 - protein, 9 aa, synthetic construct
LAMLGGTSA

SEQ ID NO: 210 - protein, 9 aa, synthetic construct
LAGGSKLEA

SEQ ID NO: 211 - protein, 9 aa, synthetic construct
LAADPTFKA

SEQ ID NO: 212 - protein, 9 aa, synthetic construct
LAETTLTRA

SEQ ID NO: 213 - protein, 9 aa, synthetic construct
LAHDWGAPA

SEQ ID NO: 214 - protein, 9 aa, synthetic construct
LAMDREIKA

SEQ ID NO: 215 - protein, 9 aa, synthetic construct
LAVFQETGA

SEQ ID NO: 216 - protein, 9 aa, synthetic construct
LAQVEVSKA

SEQ ID NO: 217 - protein, 9 aa, synthetic construct
LAPGNDLWA

SEQ ID NO: 218 - protein, 9 aa, synthetic construct
LAIPVEANA

SEQ ID NO: 219 - protein, 9 aa, synthetic construct
LAKDGGKIA

SEQ ID NO: 220 - protein, 9 aa, synthetic construct
LAERNHGYA

SEQ ID NO: 221 - protein, 9 aa, synthetic construct
LAMLACKGA

SEQ ID NO: 222 - protein, 9 aa, synthetic construct
LAHHKESIA

SEQ ID NO: 223 - protein, 9 aa, synthetic construct
LAYHQWDDA

SEQ ID NO: 224 - protein, 9 aa, synthetic construct
LAKVASMNA

SEQ ID NO: 225 - protein, 9 aa, synthetic construct
LANEGTIRA

SEQ ID NO: 226 - protein, 9 aa, synthetic construct
LAGKIEENA

SEQ ID NO: 227 - protein, 9 aa, synthetic construct
LAPVKHTWA

SEQ ID NO: 228 - protein, 9 aa, synthetic construct
LADEGREHA

SEQ ID NO: 229 - protein, 9 aa, synthetic construct
LALNNDQSA

SEQ ID NO: 230 - protein, 9 aa, synthetic construct
LADVVSVSA

SEQ ID NO: 231 - protein, 9 aa, synthetic construct
LAPSKMGLA

SEQ ID NO: 232 - protein, 9 aa, synthetic construct
LASACMRAA

SEQ ID NO: 233 - protein, 9 aa, synthetic construct
LAGDIVRNA

SEQ ID NO: 234 - protein, 9 aa, synthetic construct
LADTYKPYA

SEQ ID NO: 235 - protein, 9 aa, synthetic construct
LAFPDKSIA

SEQ ID NO: 236 - protein, 9 aa, synthetic construct
LANADFPLA

SEQ ID NO: 237 - protein, 9 aa, synthetic construct
LAKEGYRDA

SEQ ID NO: 238 - protein, 9 aa, synthetic construct
LADPMPTHA

SEQ ID NO: 239 - protein, 9 aa, synthetic construct
LAQNQKQIA

SEQ ID NO: 240 - protein, 9 aa, synthetic construct
LASENLNRA

SEQ ID NO: 241 - protein, 9 aa, synthetic construct
LAFCTPRYA

SEQ ID NO: 242 - protein, 9 aa, synthetic construct
LANLKNFSA

SEQ ID NO: 243 - protein, 9 aa, synthetic construct
LANAMEKHA

SEQ ID NO: 244 - protein, 9 aa, synthetic construct
LAMHESYNA

SEQ ID NO: 245 - protein, 9 aa, synthetic construct
LAMKYVFDA

SEQ ID NO: 246 - protein, 9 aa, synthetic construct
LAKGQAQNA

SEQ ID NO: 247 - protein, 9 aa, synthetic construct
LAFRTMEYA

SEQ ID NO: 248 - protein, 9 aa, synthetic construct
LAKKVVDGA

SEQ ID NO: 249 - protein, 9 aa, synthetic construct
LAKGMKEGA

SEQ ID NO: 250 - protein, 9 aa, synthetic construct
LADDQAVNA

SEQ ID NO: 251 - protein, 9 aa, synthetic construct
LANTWCKGA

SEQ ID NO: 252 - protein, 9 aa, synthetic construct
LANQTTREA

SEQ ID NO: 253 - protein, 9 aa, synthetic construct
LADGIQKNA

SEQ ID NO: 254 - protein, 9 aa, synthetic construct
LAHQGAIIA

SEQ ID NO: 255 - protein, 9 aa, synthetic construct
LADNCWCCA

SEQ ID NO: 256 - protein, 9 aa, synthetic construct
LADVGCENA

SEQ ID NO: 257 - protein, 9 aa, synthetic construct
LAGSRVNFA

SEQ ID NO: 258 - protein, 9 aa, synthetic construct
LATKSTGSA

SEQ ID NO: 259 - protein, 9 aa, synthetic construct
LAAHQMASA

SEQ ID NO: 260 - protein, 9 aa, synthetic construct
LAREDHRQA

SEQ ID NO: 261 - protein, 9 aa, synthetic construct
LAYLPLKYA

SEQ ID NO: 262 - protein, 9 aa, synthetic construct
LALETTQRA

SEQ ID NO: 263 - protein, 9 aa, synthetic construct
LAEGLSQFA

SEQ ID NO: 264 - protein, 9 aa, synthetic construct
LADWRTTPA

SEQ ID NO: 265 - protein, 9 aa, synthetic construct
LAETVKYMA

SEQ ID NO: 266 - protein, 9 aa, synthetic construct
LAAVKAVVA

SEQ ID NO: 267 - protein, 9 aa, synthetic construct
LAKGQSQGA

SEQ ID NO: 268 - protein, 9 aa, synthetic construct
LAVEPGPPA

SEQ ID NO: 269 - protein, 9 aa, synthetic construct
LAAEHKQTA

SEQ ID NO: 270 - protein, 9 aa, synthetic construct
LAHYPSAPA

SEQ ID NO: 271 - protein, 9 aa, synthetic construct
LATRADIFA

SEQ ID NO: 272 - protein, 9 aa, synthetic construct
LAYLRALKA

SEQ ID NO: 273 - protein, 9 aa, synthetic construct
LAQNQWTDA

SEQ ID NO: 274 - protein, 9 aa, synthetic construct
LAGGAWDWA

SEQ ID NO: 275 - protein, 9 aa, synthetic construct
LADENLQAA

SEQ ID NO: 276 - protein, 9 aa, synthetic construct
LANRLSNVA

SEQ ID NO: 277 - protein, 9 aa, synthetic construct
LAEPPDPPA

SEQ ID NO: 278 - protein, 9 aa, synthetic construct
LAQEAKLTA

SEQ ID NO: 279 - protein, 9 aa, synthetic construct
LAHTPDTFA

SEQ ID NO: 280 - protein, 9 aa, synthetic construct
LAGESSYLA

SEQ ID NO: 281 - protein, 9 aa, synthetic construct
LADLTLRAA

SEQ ID NO: 282 - protein, 9 aa, synthetic construct
LAKRDKPTA

SEQ ID NO: 283 - protein, 9 aa, synthetic construct
LANRWAIDA

SEQ ID NO: 284 - protein, 9 aa, synthetic construct
LACRSDCVA

SEQ ID NO: 285 - protein, 9 aa, synthetic construct
LAKPTGKDA

SEQ ID NO: 286 - protein, 9 aa, synthetic construct
LAGHKHDEA

SEQ ID NO: 287 - protein, 9 aa, synthetic construct
LAAQDVSWA

SEQ ID NO: 288 - protein, 9 aa, synthetic construct
LADVGCENA

SEQ ID NO: 289 - protein, 9 aa, synthetic construct
LAKGPASIA

SEQ ID NO: 290 - protein, 9 aa, synthetic construct
LAGPQRFQA

SEQ ID NO: 291 - protein, 9 aa, synthetic construct
LAATICTEA

SEQ ID NO: 292 - protein, 9 aa, synthetic construct
LAMTNTFLA

SEQ ID NO: 293 - protein, 9 aa, synthetic construct
LAKGMKEGA

SEQ ID NO: 294 - protein, 9 aa, synthetic construct
LAKGVTTAA

SEQ ID NO: 295 - protein, 9 aa, synthetic construct
LARFRGMCA

SEQ ID NO: 296 - protein, 8 aa, synthetic construct
TSHVSTSS

SEQ ID NO: 297 - protein, 8 aa, synthetic construct
SGVLFTEG

SEQ ID NO: 298 - protein, 8 aa, synthetic construct
TSGMGAIG

SEQ ID NO: 299 - protein, 8 aa, synthetic construct
TGDSEQQT

SEQ ID NO: 300 - protein, 8 aa, synthetic construct
SGPGTSGT

SEQ ID NO: 301 - protein, 8 aa, synthetic construct
SGSVGYVG

SEQ ID NO: 302 - protein, 8 aa, synthetic construct
TGEGPTKG

SEQ ID NO: 303 - protein, 8 aa, synthetic construct
TGDKWPQG

SEQ ID NO: 304 - protein, 8 aa, synthetic construct
SGEMTKPG

SEQ ID NO: 305 - protein, 8 aa, synthetic construct
TTENHKPG

SEQ ID NO: 306 - protein, 8 aa, synthetic construct
SGREIHFG

SEQ ID NO: 307 - protein, 8 aa, synthetic construct
SSENNKGG

SEQ ID NO: 308 - protein, 8 aa, synthetic construct
TSQEKQNS

SEQ ID NO: 309 - protein, 8 aa, synthetic construct
GTMFNNST

SEQ ID NO: 310 - protein, 8 aa, synthetic construct
TTGMERPT

SEQ ID NO: 311 - protein, 8 aa, synthetic construct
SGPKETGG

SEQ ID NO: 312 - protein, 8 aa, synthetic construct
SGIDTRLG

SEQ ID NO: 313 - protein, 8 aa, synthetic construct
STVPLNMG

SEQ ID NO: 314 - protein, 8 aa, synthetic construct
TGIATSYS

SEQ ID NO: 315 - protein, 8 aa, synthetic construct
TGDERKPG

SEQ ID NO: 316 - protein, 8 aa, synthetic construct
TGPGTHNG

SEQ ID NO: 317 - protein, 6 aa, synthetic construct
STTKPM

SEQ ID NO: 318 - protein, 6 aa, synthetic construct
CKEITR

SEQ ID NO: 319 - protein, 6 aa, synthetic construct
SKMRPA

SEQ ID NO: 320 - protein, 6 aa, synthetic construct
PPNQYI

SEQ ID NO: 321 - protein, 6 aa, synthetic construct
PDVSLL

SEQ ID NO: 322 - protein, 6 aa, synthetic construct
HSKDGA

SEQ ID NO: 323 - protein, 6 aa, synthetic construct
KFRHTE

SEQ ID NO: 324 - protein, 6 aa, synthetic construct
LWMTTV

SEQ ID NO: 325 - protein, 6 aa, synthetic construct
RPGRVS

SEQ ID NO: 326 - protein, 6 aa, synthetic construct
NIKKAA

SEQ ID NO: 327 - protein, 6 aa, synthetic construct
RLGRLS

SEQ ID NO: 328 - protein, 6 aa, synthetic construct
FNKVLH

SEQ ID NO: 329 - protein, 6 aa, synthetic construct
RTGRNT

SEQ ID NO: 330 - protein, 6 aa, synthetic construct
RALKIS

SEQ ID NO: 331 - protein, 6 aa, synthetic construct
RLGKVP

SEQ ID NO: 332 - protein, 6 aa, synthetic construct
KFTKAA

SEQ ID NO: 333 - protein, 6 aa, synthetic construct
HFPVFS

SEQ ID NO: 334 - protein, 6 aa, synthetic construct
NSKKLG

SEQ ID NO: 335 - protein, 6 aa, synthetic construct
KAMRTG

SEQ ID NO: 336 - protein, 9 aa, synthetic construct
LAEFRVGQA

SEQ ID NO: 337 - protein, 9 aa, synthetic construct
LAGIQQHVA

SEQ ID NO: 338 - protein, 9 aa, synthetic construct
LAQVTEMRA

SEQ ID NO: 339 - protein, 9 aa, synthetic construct
LAFNGSTSA

SEQ ID NO: 340 - protein, 9 aa, synthetic construct
LAKGFKTEA

SEQ ID NO: 341 - protein, 9 aa, synthetic construct
LAAGQAQSA

SEQ ID NO: 342 - protein, 9 aa, synthetic construct
LAFLRGPEA

SEQ ID NO: 343 - protein, 9 aa, synthetic construct
LAQVQVEGA

SEQ ID NO: 344 - protein, 9 aa, synthetic construct
LAGSMAKLA

SEQ ID NO: 345 - protein, 9 aa, synthetic construct
LAGHAACFA

SEQ ID NO: 346 - protein, 9 aa, synthetic construct
LAVNRVDMA

SEQ ID NO: 347 - protein, 9 aa, synthetic construct
LAGFHAIEA

SEQ ID NO: 348 - protein, 9 aa, synthetic construct
LAYFHSYAA

SEQ ID NO: 349 - protein, 9 aa, synthetic construct
LADHGNKPA

SEQ ID NO: 350 - protein, 9 aa, synthetic construct
LAPIQLAQA

SEQ ID NO: 351 - protein, 9 aa, synthetic construct
LAPLQTQEA

SEQ ID NO: 352 - protein, 9 aa, synthetic construct
LAEQVLEKA

SEQ ID NO: 353 - protein, 9 aa, synthetic construct
LAFPCIKEA

SEQ ID NO: 354 - protein, 9 aa, synthetic construct
LAQVEVSKA

SEQ ID NO: 355 - protein, 9 aa, synthetic construct
LAKDGGKIA

SEQ ID NO: 356 - protein, 9 aa, synthetic construct
LAKVASMNA

SEQ ID NO: 357 - protein, 9 aa, synthetic construct
LADEGREHA

SEQ ID NO: 358 - protein, 9 aa, synthetic construct
LASACMRAA

SEQ ID NO: 359 - protein, 9 aa, synthetic construct
LAGDIVRNA

SEQ ID NO: 360 - protein, 9 aa, synthetic construct
LADPMPTHA

SEQ ID NO: 361 - protein, 9 aa, synthetic construct
LAFCTPRYA

SEQ ID NO: 362 - protein, 9 aa, synthetic construct
LANAMEKHA

SEQ ID NO: 363 - protein, 9 aa, synthetic construct
LAMHESYNA

SEQ ID NO: 364 - protein, 9 aa, synthetic construct
LAKGQAQNA

SEQ ID NO: 365 - protein, 9 aa, synthetic construct
LADDQAVNA

SEQ ID NO: 366 - protein, 9 aa, synthetic construct
LADGIQKNA

SEQ ID NO: 367 - protein, 9 aa, synthetic construct
LAAHQMASA

SEQ ID NO: 368 - protein, 9 aa, synthetic construct
LAETVKYMA

SEQ ID NO: 369 - protein, 9 aa, synthetic construct
LAKGQSQGA

SEQ ID NO: 370 - protein, 9 aa, synthetic construct
LAVEPGPPA

SEQ ID NO: 371 - protein, 9 aa, synthetic construct
LAAEHKQTA

SEQ ID NO: 372 - protein, 9 aa, synthetic construct
LAEPPDPPA

SEQ ID NO: 373 - protein, 9 aa, synthetic construct
LAHTPDTFA

SEQ ID NO: 374 - protein, 9 aa, synthetic construct
LAKGPASIA

SEQ ID NO: 375 - protein, 9 aa, synthetic construct
LAKGMKEGA

SEQ ID NO: 376 - protein, 9 aa, synthetic construct
LAKGVTTAA

SEQ ID NO: 377 - protein, 6 aa, synthetic construct
NSKKLG

SEQ ID NO: 378 - protein, 6 aa, synthetic construct
KAMRTG

SEQ ID NO: 379 - protein, 9 aa, synthetic construct
LAKINAQPA

SEQ ID NO: 380 - protein, 9 aa, synthetic construct
LAEEEKYGA

SEQ ID NO: 381 - protein, 9 aa, synthetic construct
LALEVGDHA

SEQ ID NO: 382 - protein, 9 aa, synthetic construct
LAIGSDTSA

SEQ ID NO: 383 - protein, 9 aa, synthetic construct
LAAVHLMGA

SEQ ID NO: 384 - protein, 9 aa, synthetic construct
LAVRNEINA

SEQ ID NO: 385 - protein, 9 aa, synthetic construct
LAQVKQGPA

SEQ ID NO: 386 - protein, 9 aa, synthetic construct
LANKNTAIA

SEQ ID NO: 387 - protein, 9 aa, synthetic construct
LAEHKNMHA

SEQ ID NO: 388 - protein, 9 aa, synthetic construct
LAEVTYTGA

SEQ ID NO: 389 - protein, 9 aa, synthetic construct
LASADHQPA

SEQ ID NO: 390 - protein, 9 aa, synthetic construct
LAEFDGDGA

SEQ ID NO: 391 - protein, 9 aa, synthetic construct
LADFPSEKA

SEQ ID NO: 392 - protein, 9 aa, synthetic construct
LALDMWEPA

SEQ ID NO: 393 - protein, 9 aa, synthetic construct
LAKFAAKDA

SEQ ID NO: 394 - protein, 9 aa, synthetic construct
LANNAEPSA

SEQ ID NO: 395 - protein, 9 aa, synthetic construct
LAHDWGAPA

SEQ ID NO: 396 - protein, 9 aa, synthetic construct
LAMDREIKA

SEQ ID NO: 397 - protein, 9 aa, synthetic construct
LAQGNNTGA

SEQ ID NO: 398 - protein, 9 aa, synthetic construct
LADNLNTPA

SEQ ID NO: 399 - protein, 9 aa, synthetic construct
LAAANHDNA

SEQ ID NO: 400 - protein, 9 aa, synthetic construct
LAVPKADAA

SEQ ID NO: 401 - protein, 9 aa, synthetic construct
LAVFQETGA

SEQ ID NO: 402 - protein, 9 aa, synthetic construct
LAAVKAVVA

SEQ ID NO: 403 - protein, 9 aa, synthetic construct
LADNCWCCA

SEQ ID NO: 404 - protein, 9 aa, synthetic construct
LAHAGSSSA

SEQ ID NO: 405 - protein, 9 aa, synthetic construct
LAGIQQHVA

SEQ ID NO: 406 - protein, 9 aa, synthetic construct
LAHDLHGGA

SEQ ID NO: 407 - protein, 9 aa, synthetic construct
LAMHESYNA

SEQ ID NO: 408 - protein, 9 aa, synthetic construct
LATPNVNAA

SEQ ID NO: 409 - protein, 9 aa, synthetic construct
LAFNGSTSA

SEQ ID NO: 410 - protein, 9 aa, synthetic construct
LAEGLSQFA

SEQ ID NO: 411 - protein, 9 aa, synthetic construct
LAQVTEMRA

SEQ ID NO: 412 - protein, 9 aa, synthetic construct
LAAHQMASA

SEQ ID NO: 413 - protein, 9 aa, synthetic construct
LASACMRAA

SEQ ID NO: 414 - protein, 9 aa, synthetic construct
LADGIQKNA

SEQ ID NO: 415 - protein, 9 aa, synthetic construct
LAHIQEPKA

SEQ ID NO: 416 - protein, 9 aa, synthetic construct
LAAGQAQSA

SEQ ID NO: 417 - protein, 9 aa, synthetic construct
LADHGNKPA

SEQ ID NO: 418 - protein, 9 aa, synthetic construct
LAFLRGPEA

SEQ ID NO: 419 - protein, 9 aa, synthetic construct
LAETVKYMA

SEQ ID NO: 420 - protein, 9 aa, synthetic construct
LADEGREHA

SEQ ID NO: 421 - protein, 9 aa, synthetic construct
LAGDIVRNA

SEQ ID NO: 422 - protein, 9 aa, synthetic construct
LAGSMAKLA

SEQ ID NO: 423 - protein, 9 aa, synthetic construct
LAKGMKEGA

SEQ ID NO: 424 - protein, 9 aa, synthetic construct
LAEPPDPPA

SEQ ID NO: 425 - protein, 9 aa, synthetic construct
LATWCLVWA

SEQ ID NO: 426 - protein, 9 aa, synthetic construct
LAFPCIKEA

SEQ ID NO: 427 - protein, 9 aa, synthetic construct
LAKGFKTEA

SEQ ID NO: 428 - protein, 9 aa, synthetic construct
LAKGQSQGA

SEQ ID NO: 429 - protein, 9 aa, synthetic construct
LAEQVLEKA

SEQ ID NO: 430 - protein, 9 aa, synthetic construct
LAKGPASIA

SEQ ID NO: 431 - protein, 9 aa, synthetic construct
LAEFRVGQA

SEQ ID NO: 432 - protein, 9 aa, synthetic construct
LAVEPGPPA

SEQ ID NO: 433 - protein, 9 aa, synthetic construct
LAVNRVDMA

SEQ ID NO: 434 - protein, 9 aa, synthetic construct
LAYFHSYAA

SEQ ID NO: 435 - protein, 9 aa, synthetic construct
LAHTPDTFA

SEQ ID NO: 436 - protein, 9 aa, synthetic construct
LAFCTPRYA

SEQ ID NO: 437 - protein, 9 aa, synthetic construct
LAAEHKQTA

SEQ ID NO: 438 - protein, 9 aa, synthetic construct
LAPIQLAQA

SEQ ID NO: 439 - protein, 9 aa, synthetic construct
LAQVEVSKA

SEQ ID NO: 440 - protein, 9 aa, synthetic construct
LAPLQTQEA

SEQ ID NO: 441 - protein, 9 aa, synthetic construct
LARAITNEA

SEQ ID NO: 442 - protein, 9 aa, synthetic construct
LAGHAACFA

SEQ ID NO: 443 - protein, 9 aa, synthetic construct
LAGFHAIEA

SEQ ID NO: 444 - protein, 9 aa, synthetic construct
LAQVQVEGA

SEQ ID NO: 445 - protein, 9 aa, synthetic construct
LANAMEKHA

SEQ ID NO: 446 - protein, 9 aa, synthetic construct
LADPMPTHA

SEQ ID NO: 447 - protein, 9 aa, synthetic construct
LAKVASMNA

SEQ ID NO: 448 - protein, 9 aa, synthetic construct
LAKGQAQNA

SEQ ID NO: 449 - protein, 9 aa, synthetic construct
LAKDGGKIA

SEQ ID NO: 450 - protein, 9 aa, synthetic construct
LADDQAVNA

SEQ ID NO: 451 - protein, 9 aa, synthetic construct
LAKGVTTAA

SEQ ID NO: 452 - protein, 8 aa, synthetic construct
SGPKETGG

SEQ ID NO: 453 - protein, 8 aa, synthetic construct
TGPGTHNG

SEQ ID NO: 454 - protein, 6 aa, synthetic construct
NSKKLG

SEQ ID NO: 455 - protein, 6 aa, synthetic construct
KAMRTG

SEQ ID NO: 456 - protein, 9 aa, synthetic construct
LAELALIKA

SEQ ID NO: 457 - protein, 9 aa, synthetic construct
LADLSDHHA

SEQ ID NO: 458 - protein, 9 aa, synthetic construct
LADPLYAVA

SEQ ID NO: 459 - protein, 9 aa, synthetic construct
LAPMRGVYA

SEQ ID NO: 460 - protein, 9 aa, synthetic construct
LAITQSDIA

SEQ ID NO: 461 - protein, 9 aa, synthetic construct
LADDMIFVA

SEQ ID NO: 462 - protein, 9 aa, synthetic construct
LAEFRVGQA

SEQ ID NO: 463 - protein, 9 aa, synthetic construct
LAKALGMEA

SEQ ID NO: 464 - protein, 9 aa, synthetic construct
LACPVAEWA

SEQ ID NO: 465 - protein, 9 aa, synthetic construct
LANEAQGKA

SEQ ID NO: 466 - protein, 9 aa, synthetic construct
LAQVTEMRA

SEQ ID NO: 467 - protein, 9 aa, synthetic construct
LAIGERTTA

SEQ ID NO: 468 - protein, 9 aa, synthetic construct
LANLKENEA

SEQ ID NO: 469 - protein, 9 aa, synthetic construct
LAFNGSTSA

SEQ ID NO: 470 - protein, 9 aa, synthetic construct
LAQEQNAAA

SEQ ID NO: 471 - protein, 9 aa, synthetic construct
LAPTTIGGA

SEQ ID NO: 472 - protein, 9 aa, synthetic construct
LAPSGDRHA

SEQ ID NO: 473 - protein, 9 aa, synthetic construct
LAKDHHVIA

SEQ ID NO: 474 - protein, 9 aa, synthetic construct
LAQKKLLEA

SEQ ID NO: 475 - protein, 9 aa, synthetic construct
LAFLRGPEA

SEQ ID NO: 476 - protein, 9 aa, synthetic construct
LARSSTLNA

SEQ ID NO: 477 - protein, 9 aa, synthetic construct
LAHIQEPKA

SEQ ID NO: 478 - protein, 9 aa, synthetic construct
LAQVQVEGA

SEQ ID NO: 479 - protein, 9 aa, synthetic construct
LAPNTPKIA

SEQ ID NO: 480 - protein, 9 aa, synthetic construct
LAVNRVDMA

SEQ ID NO: 481 - protein, 9 aa, synthetic construct
LAGFHAIEA

SEQ ID NO: 482 - protein, 9 aa, synthetic construct
LAEGMTGIA

SEQ ID NO: 483 - protein, 9 aa, synthetic construct
LAGEVTKHA

SEQ ID NO: 484 - protein, 9 aa, synthetic construct
LAYFHSYAA

SEQ ID NO: 485 - protein, 9 aa, synthetic construct
LAPLQTQEA

SEQ ID NO: 486 - protein, 9 aa, synthetic construct
LAFPCIKEA

SEQ ID NO: 487 - protein, 9 aa, synthetic construct
LAQVEVSKA

SEQ ID NO: 488 - protein, 9 aa, synthetic construct
LAPGNDLWA

SEQ ID NO: 489 - protein, 9 aa, synthetic construct
LAKDGGKIA

SEQ ID NO: 490 - protein, 9 aa, synthetic construct
LAKVASMNA

SEQ ID NO: 491 - protein, 9 aa, synthetic construct
LAGKIEENA

SEQ ID NO: 492 - protein, 9 aa, synthetic construct
LAPVKHTWA

SEQ ID NO: 493 - protein, 9 aa, synthetic construct
LALNNDQSA

SEQ ID NO: 494 - protein, 9 aa, synthetic construct
LAGDIVRNA

SEQ ID NO: 495 - protein, 9 aa, synthetic construct
LANADFPLA

SEQ ID NO: 496 - protein, 9 aa, synthetic construct
LAKEGYRDA

SEQ ID NO: 497 - protein, 9 aa, synthetic construct
LADPMPTHA

SEQ ID NO: 498 - protein, 9 aa, synthetic construct
LAFCTPRYA

SEQ ID NO: 499 - protein, 9 aa, synthetic construct
LANLKNFSA

SEQ ID NO: 500 - protein, 9 aa, synthetic construct
LANAMEKHA

SEQ ID NO: 501 - protein, 9 aa, synthetic construct
LAKGQAQNA

SEQ ID NO: 502 - protein, 9 aa, synthetic construct
LADDQAVNA

SEQ ID NO: 503 - protein, 9 aa, synthetic construct
LANTWCKGA

SEQ ID NO: 504 - protein, 9 aa, synthetic construct
LADVGCENA

SEQ ID NO: 505 - protein, 9 aa, synthetic construct
LAGSRVNFA

SEQ ID NO: 506 - protein, 9 aa, synthetic construct
LAAHQMASA

SEQ ID NO: 507 - protein, 9 aa, synthetic construct
LAREDHRQA

SEQ ID NO: 508 - protein, 9 aa, synthetic construct
LAVEPGPPA

SEQ ID NO: 509 - protein, 9 aa, synthetic construct
LATRADIFA

SEQ ID NO: 510 - protein, 9 aa, synthetic construct
LAQNQWTDA

SEQ ID NO: 511 - protein, 9 aa, synthetic construct
LADENLQAA

SEQ ID NO: 512 - protein, 9 aa, synthetic construct
LAEPPDPPA

SEQ ID NO: 513 - protein, 9 aa, synthetic construct
LAQEAKLTA

SEQ ID NO: 514 - protein, 9 aa, synthetic construct
LAHTPDTFA

SEQ ID NO: 515 - protein, 9 aa, synthetic construct
LADLTLRAA

SEQ ID NO: 516 - protein, 9 aa, synthetic construct
LANRWAIDA

SEQ ID NO: 517 - protein, 9 aa, synthetic construct
LAKPTGKDA

SEQ ID NO: 518 - protein, 9 aa, synthetic construct
LAKGPASIA

SEQ ID NO: 519 - protein, 9 aa, synthetic construct
LAKGVTTAA

SEQ ID NO: 520 - protein, 8 aa, synthetic construct
TSHVSTSS

SEQ ID NO: 521 - protein, 8 aa, synthetic construct
SGVLFTEG

SEQ ID NO: 522 - protein, 8 aa, synthetic construct
SGPGTSGT

SEQ ID NO: 523 - protein, 8 aa, synthetic construct
TGEGPTKG

SEQ ID NO: 524 - protein, 8 aa, synthetic construct
TGDKWPQG

SEQ ID NO: 525 - protein, 8 aa, synthetic construct
SGREIHFG

SEQ ID NO: 526 - protein, 8 aa, synthetic construct
TSQEKQNS

SEQ ID NO: 527 - protein, 8 aa, synthetic construct
GTMFNNST

SEQ ID NO: 528 - protein, 8 aa, synthetic construct
TTGMERPT

SEQ ID NO: 529 - protein, 8 aa, synthetic construct
TGDERKPG

SEQ ID NO: 530 - protein, 6 aa, synthetic construct
CKEITR

SEQ ID NO: 531 - protein, 6 aa, synthetic construct
PDVSLL

SEQ ID NO: 532 - protein, 6 aa, synthetic construct
RLGRLS

SEQ ID NO: 533 - protein, 6 aa, synthetic construct
RLGKVP

SEQ ID NO: 534 - protein, 6 aa, synthetic construct
KFTKAA

SEQ ID NO: 535 - protein, 6 aa, synthetic construct
HFPVFS

SEQ ID NO: 536 - protein, 6 aa, synthetic construct
NSKKLG

SEQ ID NO: 537 - protein, 6 aa, synthetic construct
KAMRTG

SEQ ID NO: 538 - protein, 9 aa, synthetic construct
LAFNSCSYA

SEQ ID NO: 539 - protein, 9 aa, synthetic construct
LAGGAWDWA

SEQ ID NO: 540 - protein, 9 aa, synthetic construct
LANADFPLA

SEQ ID NO: 541 - protein, 9 aa, synthetic construct
LAAQDVSWA

SEQ ID NO: 542 - protein, 9 aa, synthetic construct
LADVGCENA

SEQ ID NO: 543 - protein, 9 aa, synthetic construct
LAATICTEA

SEQ ID NO: 544 - protein, 9 aa, synthetic construct
LAEGLSQFA

SEQ ID NO: 545 - protein, 9 aa, synthetic construct
LAKPTGKDA

SEQ ID NO: 546 - protein, 9 aa, synthetic construct
LARFRGMCA

SEQ ID NO: 547 - protein, 9 aa, synthetic construct
LARRKSNEA

SEQ ID NO: 548 - protein, 9 aa, synthetic construct
LAPQNLDEA

SEQ ID NO: 549 - protein, 9 aa, synthetic construct
LAMFVWVPA

SEQ ID NO: 550 - protein, 9 aa, synthetic construct
LACTYTYAA

SEQ ID NO: 551 - protein, 9 aa, synthetic construct
LAKINAQPA

SEQ ID NO: 552 - protein, 9 aa, synthetic construct
LADLSDHHA

SEQ ID NO: 553 - protein, 9 aa, synthetic construct
LAHEGRQAA

SEQ ID NO: 554 - protein, 9 aa, synthetic construct
LADAHSVTA

SEQ ID NO: 555 - protein, 9 aa, synthetic construct
LADLGYPNA

SEQ ID NO: 556 - protein, 9 aa, synthetic construct
LAQWFLWRA

SEQ ID NO: 557 - protein, 9 aa, synthetic construct
LAYAEQSKA

SEQ ID NO: 558 - protein, 9 aa, synthetic construct
LAAKMYNGA

SEQ ID NO: 559 - protein, 9 aa, synthetic construct
LAEADKWYA

SEQ ID NO: 560 - protein, 9 aa, synthetic construct
LATVYKSPA

SEQ ID NO: 561 - protein, 9 aa, synthetic construct
LASRTAVAA

SEQ ID NO: 562 - protein, 9 aa, synthetic construct
LADDMIFVA

SEQ ID NO: 563 - protein, 9 aa, synthetic construct
LAEFRVGQA

SEQ ID NO: 564 - protein, 9 aa, synthetic construct
LAADPTFKA

SEQ ID NO: 565 - protein, 9 aa, synthetic construct
LAVSRHGEA

SEQ ID NO: 566 - protein, 9 aa, synthetic construct
LAPMRGVYA

SEQ ID NO: 567 - protein, 9 aa, synthetic construct
LAFPDKSIA

SEQ ID NO: 568 - protein, 9 aa, synthetic construct
LAEFHIPTA

SEQ ID NO: 569 - protein, 9 aa, synthetic construct
LALNNDQSA

SEQ ID NO: 570 - protein, 9 aa, synthetic construct
LAKALGMEA

SEQ ID NO: 571 - protein, 9 aa, synthetic construct
LAYLPLKYA

SEQ ID NO: 572 - protein, 9 aa, synthetic construct
LAHYPSAPA

SEQ ID NO: 573 - protein, 9 aa, synthetic construct
LANLKENEA

SEQ ID NO: 574 - protein, 9 aa, synthetic construct
LARSSTLNA

SEQ ID NO: 575 - protein, 9 aa, synthetic construct
LAIGERTTA

SEQ ID NO: 576 - protein, 9 aa, synthetic construct
LAWIERSMA

SEQ ID NO: 577 - protein, 9 aa, synthetic construct
LAYDNTAEA

SEQ ID NO: 578 - protein, 9 aa, synthetic construct
LAERNHGYA

SEQ ID NO: 579 - protein, 9 aa, synthetic construct
LADILVGQA

SEQ ID NO: 580 - protein, 9 aa, synthetic construct
LAFNGSTSA

SEQ ID NO: 581 - protein, 9 aa, synthetic construct
LADWRTTPA

SEQ ID NO: 582 - protein, 9 aa, synthetic construct
LAPSGDRHA

SEQ ID NO: 583 - protein, 9 aa, synthetic construct
LAQEAKLTA

SEQ ID NO: 584 - protein, 9 aa, synthetic construct
LAAEHKQTA

SEQ ID NO: 585 - protein, 9 aa, synthetic construct
LAETTLTRA

SEQ ID NO: 586 - protein, 9 aa, synthetic construct
LAGESSYLA

SEQ ID NO: 587 - protein, 9 aa, synthetic construct
LAQVQVEGA

SEQ ID NO: 588 - protein, 9 aa, synthetic construct
LAVNRVDMA

SEQ ID NO: 589 - protein, 9 aa, synthetic construct
LAFCTPRYA

SEQ ID NO: 590 - protein, 9 aa, synthetic construct
LADDQAVNA

SEQ ID NO: 591 - protein, 9 aa, synthetic construct
LAREDHRQA

SEQ ID NO: 592 - protein, 9 aa, synthetic construct
LAKVASMNA

SEQ ID NO: 593 - protein, 9 aa, synthetic construct
LAKDGGKIA

SEQ ID NO: 594 - protein, 9 aa, synthetic construct
LANRWAIDA

SEQ ID NO: 595 - protein, 9 aa, synthetic construct
LADLTLRAA

SEQ ID NO: 596 - protein, 9 aa, synthetic construct
LAKEGYRDA

SEQ ID NO: 597 - protein, 9 aa, synthetic construct
LAGKIEENA

SEQ ID NO: 598 - protein, 9 aa, synthetic construct
LAPVKHTWA

SEQ ID NO: 599 - protein, 9 aa, synthetic construct
LAQVEVSKA

SEQ ID NO: 600 - protein, 9 aa, synthetic construct
LAPLQTQEA

SEQ ID NO: 601 - protein, 9 aa, synthetic construct
LAAHQMASA

SEQ ID NO: 602 - protein, 9 aa, synthetic construct
LAKKVVDGA

SEQ ID NO: 603 - protein, 9 aa, synthetic construct
LAKGPASIA

SEQ ID NO: 604 - protein, 9 aa, synthetic construct
LAKGQAQNA

SEQ ID NO: 605 - protein, 8 aa, synthetic construct
SGVLFTEG

SEQ ID NO: 606 - protein, 8 aa, synthetic construct
SGPGTSGT

SEQ ID NO: 607 - protein, 8 aa, synthetic construct
TGEGPTKG

SEQ ID NO: 608 - protein, 8 aa, synthetic construct
SGSVGYVG

SEQ ID NO: 609 - protein, 8 aa, synthetic construct
STVPLNMG

SEQ ID NO: 610 - protein, 8 aa, synthetic construct
SGREIHFG

SEQ ID NO: 611 - protein, 8 aa, synthetic construct
GTMFNNST

SEQ ID NO: 612 - protein, 8 aa, synthetic construct
TGDKWPQG

SEQ ID NO: 613 - protein, 8 aa, synthetic construct
TSQEKQNS

SEQ ID NO: 614 - protein, 8 aa, synthetic construct
TTGMERPT

SEQ ID NO: 615 - protein, 8 aa, synthetic construct
TGDERKPG

SEQ ID NO: 616 - protein, 6 aa, synthetic construct
PDVSLL

SEQ ID NO: 617 - protein, 6 aa, synthetic construct
RTGRNT

SEQ ID NO: 618 - protein, 6 aa, synthetic construct
KFTKAA

SEQ ID NO: 619 - protein, 6 aa, synthetic construct
RLGRLS

SEQ ID NO: 620 - protein, 6 aa, synthetic construct
KAMRTG

SEQ ID NO: 621 - protein, 6 aa, synthetic construct
HFPVFS

SEQ ID NO: 622 - protein, 6 aa, synthetic construct
RLGKVP

SEQ ID NO: 623 - protein, 9 aa, synthetic construct
LAHGGLREA

SEQ ID NO: 624 - protein, 9 aa, synthetic construct
LATDRTKTA

SEQ ID NO: 625 - protein, 9 aa, synthetic construct
LARRKSNEA

SEQ ID NO: 626 - protein, 9 aa, synthetic construct
LAVDNIWAA

SEQ ID NO: 627 - protein, 9 aa, synthetic construct
LADPLYAVA

SEQ ID NO: 628 - protein, 9 aa, synthetic construct
LAGQAMMQA

SEQ ID NO: 629 - protein, 9 aa, synthetic construct
LAMTKITDA

SEQ ID NO: 630 - protein, 9 aa, synthetic construct
LAFTHGTNA

SEQ ID NO: 631 - protein, 9 aa, synthetic construct
LADPGWKYA

SEQ ID NO: 632 - protein, 9 aa, synthetic construct
LAGGEYETA

SEQ ID NO: 633 - protein, 9 aa, synthetic construct
LAALVDANA

SEQ ID NO: 634 - protein, 9 aa, synthetic construct
LADPTETPA

SEQ ID NO: 635 - protein, 9 aa, synthetic construct
LALENIGQA

SEQ ID NO: 636 - protein, 9 aa, synthetic construct
LALNDNVGA

SEQ ID NO: 637 - protein, 9 aa, synthetic construct
LAHRAPDSA

SEQ ID NO: 638 - protein, 9 aa, synthetic construct
LAMFVWVPA

SEQ ID NO: 639 - protein, 9 aa, synthetic construct
LAEGQEDSA

SEQ ID NO: 640 - protein, 9 aa, synthetic construct
LAPDAKDWA

SEQ ID NO: 641 - protein, 9 aa, synthetic construct
LAPHIAKDA

SEQ ID NO: 642 - protein, 9 aa, synthetic construct
LAAVTEYVA

SEQ ID NO: 643 - protein, 9 aa, synthetic construct
LAFCIKHCA

SEQ ID NO: 644 - protein, 9 aa, synthetic construct
LAPPGNPLA

SEQ ID NO: 645 - protein, 9 aa, synthetic construct
LAHWQEEWA

SEQ ID NO: 646 - protein, 9 aa, synthetic construct
LAEFRVGQA

SEQ ID NO: 647 - protein, 9 aa, synthetic construct
LAYVIENDA

SEQ ID NO: 648 - protein, 9 aa, synthetic construct
LASTTMNIA

SEQ ID NO: 649 - protein, 9 aa, synthetic construct
LAEFHIPTA

SEQ ID NO: 650 - protein, 9 aa, synthetic construct
LASRTAVAA

SEQ ID NO: 651 - protein, 9 aa, synthetic construct
LAIGSDTSA

SEQ ID NO: 652 - protein, 9 aa, synthetic construct
LADDMIFVA

SEQ ID NO: 653 - protein, 9 aa, synthetic construct
LAKPPPKDA

SEQ ID NO: 654 - protein, 9 aa, synthetic construct
LAYVALFYA

SEQ ID NO: 655 - protein, 9 aa, synthetic construct
LAFQQQRCA

SEQ ID NO: 656 - protein, 9 aa, synthetic construct
LAAVHLMGA

SEQ ID NO: 657 - protein, 9 aa, synthetic construct
LACPVAEWA

SEQ ID NO: 658 - protein, 9 aa, synthetic construct
LAVRNEINA

SEQ ID NO: 659 - protein, 9 aa, synthetic construct
LADSSKWIA

SEQ ID NO: 660 - protein, 9 aa, synthetic construct
LAVMGNMLA

SEQ ID NO: 661 - protein, 9 aa, synthetic construct
LANANTRPA

SEQ ID NO: 662 - protein, 9 aa, synthetic construct
LAPNQGTPA

SEQ ID NO: 663 - protein, 9 aa, synthetic construct
LAGENHISA

SEQ ID NO: 664 - protein, 9 aa, synthetic construct
LALNSGKMA

SEQ ID NO: 665 - protein, 9 aa, synthetic construct
LAYDAGGHA

SEQ ID NO: 666 - protein, 9 aa, synthetic construct
LARAITNEA

SEQ ID NO: 667 - protein, 9 aa, synthetic construct
LAWNKCPYA

SEQ ID NO: 668 - protein, 9 aa, synthetic construct
LANLKENEA

SEQ ID NO: 669 - protein, 9 aa, synthetic construct
LAQVTEMRA

SEQ ID NO: 670 - protein, 9 aa, synthetic construct
LARDQLKLA

SEQ ID NO: 671 - protein, 9 aa, synthetic construct
LAVSRHGEA

SEQ ID NO: 672 - protein, 9 aa, synthetic construct
LAAVGMKMA

SEQ ID NO: 673 - protein, 9 aa, synthetic construct
LAEHKNMHA

SEQ ID NO: 674 - protein, 9 aa, synthetic construct
LAMNEPVTA

SEQ ID NO: 675 - protein, 9 aa, synthetic construct
LAEFVHKGA

SEQ ID NO: 676 - protein, 9 aa, synthetic construct
LAAYHDSAA

SEQ ID NO: 677 - protein, 9 aa, synthetic construct
LAKALGMEA

SEQ ID NO: 678 - protein, 9 aa, synthetic construct
LAVKGLVNA

SEQ ID NO: 679 - protein, 9 aa, synthetic construct
LAGIQQHVA

SEQ ID NO: 680 - protein, 9 aa, synthetic construct
LADGGTRPA

SEQ ID NO: 681 - protein, 9 aa, synthetic construct
LAHEPMFNA

SEQ ID NO: 682 - protein, 9 aa, synthetic construct
LASVSTIQA

SEQ ID NO: 683 - protein, 9 aa, synthetic construct
LASAVMYWA

SEQ ID NO: 684 - protein, 9 aa, synthetic construct
LADKNRLQA

SEQ ID NO: 685 - protein, 9 aa, synthetic construct
LAPMGQNMA

SEQ ID NO: 686 - protein, 9 aa, synthetic construct
LAAVGVGYA

SEQ ID NO: 687 - protein, 9 aa, synthetic construct
LAGEFTGKA

SEQ ID NO: 688 - protein, 9 aa, synthetic construct
LAGEVTKHA

SEQ ID NO: 689 - protein, 9 aa, synthetic construct
LAITQSDIA

SEQ ID NO: 690 - protein, 9 aa, synthetic construct
LANEAQGKA

SEQ ID NO: 691 - protein, 9 aa, synthetic construct
LAAKPKDGA

SEQ ID NO: 692 - protein, 9 aa, synthetic construct
LAAGQAQSA

SEQ ID NO: 693 - protein, 9 aa, synthetic construct
LAPMRGVYA

SEQ ID NO: 694 - protein, 9 aa, synthetic construct
LASRLNSPA

SEQ ID NO: 695 - protein, 9 aa, synthetic construct
LACYPPTCA

SEQ ID NO: 696 - protein, 9 aa, synthetic construct
LAKVSKGDA

SEQ ID NO: 697 - protein, 9 aa, synthetic construct
LAGERETVA

SEQ ID NO: 698 - protein, 9 aa, synthetic construct
LAYITEKSA

SEQ ID NO: 699 - protein, 9 aa, synthetic construct
LASADHQPA

SEQ ID NO: 700 - protein, 9 aa, synthetic construct
LAHIQEPKA

SEQ ID NO: 701 - protein, 9 aa, synthetic construct
LAFNGSTSA

SEQ ID NO: 702 - protein, 9 aa, synthetic construct
LAEFDGDGA

SEQ ID NO: 703 - protein, 9 aa, synthetic construct
LAWKCKGTA

SEQ ID NO: 704 - protein, 9 aa, synthetic construct
LAMGHNYVA

SEQ ID NO: 705 - protein, 9 aa, synthetic construct
LAVTPPWYA

SEQ ID NO: 706 - protein, 9 aa, synthetic construct
LAGHAACFA

SEQ ID NO: 707 - protein, 9 aa, synthetic construct
LAAANHDNA

SEQ ID NO: 708 - protein, 9 aa, synthetic construct
LAKDHHVIA

SEQ ID NO: 709 - protein, 9 aa, synthetic construct
LALHQERQA

SEQ ID NO: 710 - protein, 9 aa, synthetic construct
LADMTRFHA

SEQ ID NO: 711 - protein, 9 aa, synthetic construct
LATMHNFEA

SEQ ID NO: 712 - protein, 9 aa, synthetic construct
LAEYHNNDA

SEQ ID NO: 713 - protein, 9 aa, synthetic construct
LAGKTISGA

SEQ ID NO: 714 - protein, 9 aa, synthetic construct
LADFPSEKA

SEQ ID NO: 715 - protein, 9 aa, synthetic construct
LALKLRTEA

SEQ ID NO: 716 - protein, 9 aa, synthetic construct
LAISQPNPA

SEQ ID NO: 717 - protein, 9 aa, synthetic construct
LAFGFSADA

SEQ ID NO: 718 - protein, 9 aa, synthetic construct
LAKDKGLIA

SEQ ID NO: 719 - protein, 9 aa, synthetic construct
LAIGERTTA

SEQ ID NO: 720 - protein, 9 aa, synthetic construct
LAPQKQPVA

SEQ ID NO: 721 - protein, 9 aa, synthetic construct
LAKFMWIHA

SEQ ID NO: 722 - protein, 9 aa, synthetic construct
LAQEQNAAA

SEQ ID NO: 723 - protein, 9 aa, synthetic construct
LAQVQVEGA

SEQ ID NO: 724 - protein, 9 aa, synthetic construct
LAALNSQTA

SEQ ID NO: 725 - protein, 9 aa, synthetic construct
LAHHKESIA

SEQ ID NO: 726 - protein, 9 aa, synthetic construct
LAPCYEPPA

SEQ ID NO: 727 - protein, 9 aa, synthetic construct
LANQTTREA

SEQ ID NO: 728 - protein, 9 aa, synthetic construct
LADTHTTYA

SEQ ID NO: 729 - protein, 9 aa, synthetic construct
LAQKKLLEA

SEQ ID NO: 730 - protein, 9 aa, synthetic construct
LAVDIMRGA

SEQ ID NO: 731 - protein, 9 aa, synthetic construct
LAPIQLAQA

SEQ ID NO: 732 - protein, 9 aa, synthetic construct
LANIVQQDA

SEQ ID NO: 733 - protein, 9 aa, synthetic construct
LAKSAGILA

SEQ ID NO: 734 - protein, 9 aa, synthetic construct
LAHDLHGGA

SEQ ID NO: 735 - protein, 9 aa, synthetic construct
LAKGFKTEA

SEQ ID NO: 736 - protein, 9 aa, synthetic construct
LAGSMAKLA

SEQ ID NO: 737 - protein, 9 aa, synthetic construct
LAGFMEYYA

SEQ ID NO: 738 - protein, 9 aa, synthetic construct
LAQGNNTGA

SEQ ID NO: 739 - protein, 9 aa, synthetic construct
LAVRTGSMA

SEQ ID NO: 740 - protein, 9 aa, synthetic construct
LAYGQQTTA

SEQ ID NO: 741 - protein, 9 aa, synthetic construct
LADCMMINA

SEQ ID NO: 742 - protein, 9 aa, synthetic construct
LAGVVKTDA

SEQ ID NO: 743 - protein, 9 aa, synthetic construct
LASENLNRA

SEQ ID NO: 744 - protein, 9 aa, synthetic construct
LAQAGDTAA

SEQ ID NO: 745 - protein, 9 aa, synthetic construct
LAMHESYNA

SEQ ID NO: 746 - protein, 9 aa, synthetic construct
LAVNRVDMA

SEQ ID NO: 747 - protein, 9 aa, synthetic construct
LAVPKADAA

SEQ ID NO: 748 - protein, 9 aa, synthetic construct
LAPSGDRHA

SEQ ID NO: 749 - protein, 9 aa, synthetic construct
LAFRTMEYA

SEQ ID NO: 750 - protein, 9 aa, synthetic construct
LATWCLVWA

SEQ ID NO: 751 - protein, 9 aa, synthetic construct
LAEGMTGIA

SEQ ID NO: 752 - protein, 9 aa, synthetic construct
LAKEGYRDA

SEQ ID NO: 753 - protein, 9 aa, synthetic construct
LAAVTKDSA

SEQ ID NO: 754 - protein, 9 aa, synthetic construct
LAPLQTQEA

SEQ ID NO: 755 - protein, 9 aa, synthetic construct
LADHGNKPA

SEQ ID NO: 756 - protein, 9 aa, synthetic construct
LADVVSVSA

SEQ ID NO: 757 - protein, 9 aa, synthetic construct
LAQVEVSKA

SEQ ID NO: 758 - protein, 9 aa, synthetic construct
LAPSKMGLA

SEQ ID NO: 759 - protein, 9 aa, synthetic construct
LAWIERSMA

SEQ ID NO: 760 - protein, 9 aa, synthetic construct
LAYDNTAEA

SEQ ID NO: 761 - protein, 9 aa, synthetic construct
LAHDWGAPA

SEQ ID NO: 762 - protein, 9 aa, synthetic construct
LAMDREIKA

SEQ ID NO: 763 - protein, 9 aa, synthetic construct
LAVFQETGA

SEQ ID NO: 764 - protein, 9 aa, synthetic construct
LAKDGGKIA

SEQ ID NO: 765 - protein, 9 aa, synthetic construct
LALNAAATA

SEQ ID NO: 766 - protein, 9 aa, synthetic construct
LAIPVEANA

SEQ ID NO: 767 - protein, 9 aa, synthetic construct
LARGTLMTA

SEQ ID NO: 768 - protein, 9 aa, synthetic construct
LAGDIVRNA

SEQ ID NO: 769 - protein, 9 aa, synthetic construct
LAMLACKGA

SEQ ID NO: 770 - protein, 9 aa, synthetic construct
LADLSDHHA

SEQ ID NO: 771 - protein, 9 aa, synthetic construct
LANMMAAGA

SEQ ID NO: 772 - protein, 9 aa, synthetic construct
LALPEGRFA

SEQ ID NO: 773 - protein, 9 aa, synthetic construct
LAKGQAQNA

SEQ ID NO: 774 - protein, 9 aa, synthetic construct
LAAVKAVVA

SEQ ID NO: 775 - protein, 9 aa, synthetic construct
LANQGFLTA

SEQ ID NO: 776 - protein, 9 aa, synthetic construct
LAETTLTRA

SEQ ID NO: 777 - protein, 9 aa, synthetic construct
LADGIQKNA

SEQ ID NO: 778 - protein, 9 aa, synthetic construct
LANAMEKHA

SEQ ID NO: 779 - protein, 9 aa, synthetic construct
LADIVGESA

SEQ ID NO: 780 - protein, 9 aa, synthetic construct
LANVTLQSA

SEQ ID NO: 781 - protein, 9 aa, synthetic construct
LAFPCIKEA

SEQ ID NO: 782 - protein, 9 aa, synthetic construct
LADEGREHA

SEQ ID NO: 783 - protein, 9 aa, synthetic construct
LAREDHRQA

SEQ ID NO: 784 - protein, 9 aa, synthetic construct
LAQNQWTDA

SEQ ID NO: 785 - protein, 9 aa, synthetic construct
LAQNQKQIA

SEQ ID NO: 786 - protein, 9 aa, synthetic construct
LATPNVNAA

SEQ ID NO: 787 - protein, 9 aa, synthetic construct
LAPGNDLWA

SEQ ID NO: 788 - protein, 9 aa, synthetic construct
LAMLGGTSA

SEQ ID NO: 789 - protein, 9 aa, synthetic construct
LAKKVVDGA

SEQ ID NO: 790 - protein, 9 aa, synthetic construct
LAGGSKLEA

SEQ ID NO: 791 - protein, 9 aa, synthetic construct
LALYQCDTA

SEQ ID NO: 792 - protein, 9 aa, synthetic construct
LAHQGAIIA

SEQ ID NO: 793 - protein, 9 aa, synthetic construct
LAGFHAIEA

SEQ ID NO: 794 - protein, 9 aa, synthetic construct
LANEGTIRA

SEQ ID NO: 795 - protein, 9 aa, synthetic construct
LADPMPTHA

SEQ ID NO: 796 - protein, 9 aa, synthetic construct
LAGKIEENA

SEQ ID NO: 797 - protein, 9 aa, synthetic construct
LAPVKHTWA

SEQ ID NO: 798 - protein, 9 aa, synthetic construct
LARSSTLNA

SEQ ID NO: 799 - protein, 9 aa, synthetic construct
LADDQAVNA

SEQ ID NO: 800 - protein, 9 aa, synthetic construct
LATKSTGSA

SEQ ID NO: 801 - protein, 9 aa, synthetic construct
LAFLRGPEA

SEQ ID NO: 802 - protein, 9 aa, synthetic construct
LADENLQAA

SEQ ID NO: 803 - protein, 9 aa, synthetic construct
LANADFPLA

SEQ ID NO: 804 - protein, 9 aa, synthetic construct
LAPTTIGGA

SEQ ID NO: 805 - protein, 9 aa, synthetic construct
LASACMRAA

SEQ ID NO: 806 - protein, 9 aa, synthetic construct
LAKVASMNA

SEQ ID NO: 807 - protein, 9 aa, synthetic construct
LALNNDQSA

SEQ ID NO: 808 - protein, 9 aa, synthetic construct
LAGGKQALA

SEQ ID NO: 809 - protein, 9 aa, synthetic construct
LAVAVDCFA

SEQ ID NO: 810 - protein, 9 aa, synthetic construct
LALETTQRA

SEQ ID NO: 811 - protein, 9 aa, synthetic construct
LAPNTPKIA

SEQ ID NO: 812 - protein, 9 aa, synthetic construct
LASIGFSAA

SEQ ID NO: 813 - protein, 9 aa, synthetic construct
LADVGCENA

SEQ ID NO: 814 - protein, 9 aa, synthetic construct
LAGSRVNFA

SEQ ID NO: 815 - protein, 9 aa, synthetic construct
LADLTLRAA

SEQ ID NO: 816 - protein, 9 aa, synthetic construct
LAKGQSQGA

SEQ ID NO: 817 - protein, 9 aa, synthetic construct
LAHTPDTFA

SEQ ID NO: 818 - protein, 9 aa, synthetic construct
LAAHQMASA

SEQ ID NO: 819 - protein, 9 aa, synthetic construct
LACRSDCVA

SEQ ID NO: 820 - protein, 9 aa, synthetic construct
LANTWCKGA

SEQ ID NO: 821 - protein, 9 aa, synthetic construct
LAAEHKQTA

SEQ ID NO: 822 - protein, 9 aa, synthetic construct
LAAEHIGRA

SEQ ID NO: 823 - protein, 9 aa, synthetic construct
LAEQVLEKA

SEQ ID NO: 824 - protein, 9 aa, synthetic construct
LAYFHSYAA

SEQ ID NO: 825 - protein, 9 aa, synthetic construct
LAEPPDPPA

SEQ ID NO: 826 - protein, 9 aa, synthetic construct
LATRADIFA

SEQ ID NO: 827 - protein, 9 aa, synthetic construct
LADTYKPYA

SEQ ID NO: 828 - protein, 9 aa, synthetic construct
LANRLSNVA

SEQ ID NO: 829 - protein, 9 aa, synthetic construct
LAMTNTFLA

SEQ ID NO: 830 - protein, 9 aa, synthetic construct
LAGESSYLA

SEQ ID NO: 831 - protein, 9 aa, synthetic construct
LANRWAIDA

SEQ ID NO: 832 - protein, 9 aa, synthetic construct
LAETVKYMA

SEQ ID NO: 833 - protein, 9 aa, synthetic construct
LAMKYVFDA

SEQ ID NO: 834 - protein, 9 aa, synthetic construct
LAKRDKPTA

SEQ ID NO: 835 - protein, 9 aa, synthetic construct
LADWRTTPA

SEQ ID NO: 836 - protein, 9 aa, synthetic construct
LAKGVTTAA

SEQ ID NO: 837 - protein, 9 aa, synthetic construct
LAFCTPRYA

SEQ ID NO: 838 - protein, 9 aa, synthetic construct
LANLKNFSA

SEQ ID NO: 839 - protein, 9 aa, synthetic construct
LAHYPSAPA

SEQ ID NO: 840 - protein, 9 aa, synthetic construct
LAQEAKLTA

SEQ ID NO: 841 - protein, 9 aa, synthetic construct
LAVEPGPPA

SEQ ID NO: 842 - protein, 9 aa, synthetic construct
LAKGPASIA

SEQ ID NO: 843 - protein, 9 aa, synthetic construct
LAEGLSQFA

SEQ ID NO: 844 - protein, 9 aa, synthetic construct
LAKPTGKDA

SEQ ID NO: 845 - protein, 9 aa, synthetic construct
LAKGMKEGA

SEQ ID NO: 846 - protein, 8 aa, synthetic construct
TSHVSTSS

SEQ ID NO: 847 - protein, 8 aa, synthetic construct
SGVLFTEG

SEQ ID NO: 848 - protein, 8 aa, synthetic construct
TSGMGAIG

SEQ ID NO: 849 - protein, 8 aa, synthetic construct
TGDSEQQT

SEQ ID NO: 850 - protein, 8 aa, synthetic construct
SGSVGYVG

SEQ ID NO: 851 - protein, 8 aa, synthetic construct
TGDKWPQG

SEQ ID NO: 852 - protein, 8 aa, synthetic construct
SGEMTKPG

SEQ ID NO: 853 - protein, 8 aa, synthetic construct
SGPGTSGT

SEQ ID NO: 854 - protein, 8 aa, synthetic construct
SSENNKGG

SEQ ID NO: 855 - protein, 8 aa, synthetic construct
TTENHKPG

SEQ ID NO: 856 - protein, 8 aa, synthetic construct
TSQEKQNS

SEQ ID NO: 857 - protein, 8 aa, synthetic construct
GTMFNNST

SEQ ID NO: 858 - protein, 8 aa, synthetic construct
SGPKETGG

SEQ ID NO: 859 - protein, 8 aa, synthetic construct
SGIDTRLG

SEQ ID NO: 860 - protein, 8 aa, synthetic construct
TTGMERPT

SEQ ID NO: 861 - protein, 8 aa, synthetic construct
TGEGPTKG

SEQ ID NO: 862 - protein, 8 aa, synthetic construct
TGPGTHNG

SEQ ID NO: 863 - protein, 8 aa, synthetic construct
SGREIHFG

SEQ ID NO: 864 - protein, 8 aa, synthetic construct
TGDERKPG

SEQ ID NO: 865 - protein, 6 aa, synthetic construct
STTKPM

SEQ ID NO: 866 - protein, 6 aa, synthetic construct
CKEITR

SEQ ID NO: 867 - protein, 6 aa, synthetic construct
PDVSLL

SEQ ID NO: 868 - protein, 6 aa, synthetic construct
FNKVLH

SEQ ID NO: 869 - protein, 6 aa, synthetic construct
RLGRLS

SEQ ID NO: 870 - protein, 6 aa, synthetic construct
RTGRNT

SEQ ID NO: 871 - protein, 6 aa, synthetic construct
RALKIS

SEQ ID NO: 872 - protein, 6 aa, synthetic construct
NIKKAA

SEQ ID NO: 873 - protein, 6 aa, synthetic construct
RPGRVS

SEQ ID NO: 874 - protein, 6 aa, synthetic construct
RLGKVP

SEQ ID NO: 875 - protein, 6 aa, synthetic construct
NSKKLG

SEQ ID NO: 876 - protein, 6 aa, synthetic construct
KAMRTG

SEQ ID NO: 877 - protein, 6 aa, synthetic construct
KFTKAA

SEQ ID NO: 878 - protein, 6 aa, synthetic construct
HSKDGA

SEQ ID NO: 879 - protein, 6 aa, synthetic construct
HFPVFS

SEQ ID NO: 880 - protein, 9 aa, synthetic construct
LAWRIMKHA

SEQ ID NO: 881 - protein, 9 aa, synthetic construct
LASNMERIA

SEQ ID NO: 882 - protein, 9 aa, synthetic construct
LADYRNDKA

SEQ ID NO: 883 - protein, 9 aa, synthetic construct
LAPNQGTPA

SEQ ID NO: 884 - protein, 9 aa, synthetic construct
LAKPPPKDA

SEQ ID NO: 885 - protein, 9 aa, synthetic construct
LALPEGRFA

SEQ ID NO: 886 - protein, 9 aa, synthetic construct
LAHPGTTFA

SEQ ID NO: 887 - protein, 9 aa, synthetic construct
LARGVAPIA

SEQ ID NO: 888 - protein, 9 aa, synthetic construct
LAHRAPDSA

SEQ ID NO: 889 - protein, 9 aa, synthetic construct
LAELALIKA

SEQ ID NO: 890 - protein, 9 aa, synthetic construct
LAVAVDCFA

SEQ ID NO: 891 - protein, 9 aa, synthetic construct
LACSSTWYA

SEQ ID NO: 892 - protein, 9 aa, synthetic construct
LAELDFKWA

SEQ ID NO: 893 - protein, 9 aa, synthetic construct
LAHEPMFNA

SEQ ID NO: 894 - protein, 9 aa, synthetic construct
LAKDGMIGA

SEQ ID NO: 895 - protein, 9 aa, synthetic construct
LAHEGRQAA

SEQ ID NO: 896 - protein, 9 aa, synthetic construct
LAEYHNNDA

SEQ ID NO: 897 - protein, 9 aa, synthetic construct
LAAEHIGRA

SEQ ID NO: 898 - protein, 9 aa, synthetic construct
LAEPFPVAA

SEQ ID NO: 899 - protein, 9 aa, synthetic construct
LAHIQEPKA

SEQ ID NO: 900 - protein, 9 aa, synthetic construct
LAFNGSTSA

SEQ ID NO: 901 - protein, 9 aa, synthetic construct
LADNCWCCA

SEQ ID NO: 902 - protein, 9 aa, synthetic construct
LACPVAEWA

SEQ ID NO: 903 - protein, 9 aa, synthetic construct
LAMGHNYVA

SEQ ID NO: 904 - protein, 9 aa, synthetic construct
LANQGFLTA

SEQ ID NO: 905 - protein, 9 aa, synthetic construct
LAPMRGVYA

SEQ ID NO: 906 - protein, 9 aa, synthetic construct
LANEAQGKA

SEQ ID NO: 907 - protein, 9 aa, synthetic construct
LAQKKLLEA

SEQ ID NO: 908 - protein, 9 aa, synthetic construct
LAPCYEPPA

SEQ ID NO: 909 - protein, 9 aa, synthetic construct
LAISQPNPA

SEQ ID NO: 910 - protein, 9 aa, synthetic construct
LAQVQVEGA

SEQ ID NO: 911 - protein, 9 aa, synthetic construct
LAQAGDTAA

SEQ ID NO: 912 - protein, 9 aa, synthetic construct
LARSSTLNA

SEQ ID NO: 913 - protein, 9 aa, synthetic construct
LAEFRVGQA

SEQ ID NO: 914 - protein, 9 aa, synthetic construct
LAGSMAKLA

SEQ ID NO: 915 - protein, 9 aa, synthetic construct
LAPIQLAQA

SEQ ID NO: 916 - protein, 9 aa, synthetic construct
LAPSGDRHA

SEQ ID NO: 917 - protein, 9 aa, synthetic construct
LANRLSNVA

SEQ ID NO: 918 - protein, 9 aa, synthetic construct
LADPMPTHA

SEQ ID NO: 919 - protein, 9 aa, synthetic construct
LAVEPGPPA

SEQ ID NO: 920 - protein, 9 aa, synthetic construct
LAYFHSYAA

SEQ ID NO: 921 - protein, 9 aa, synthetic construct
LAMTNTFLA

SEQ ID NO: 922 - protein, 9 aa, synthetic construct
LAFPCIKEA

SEQ ID NO: 923 - protein, 9 aa, synthetic construct
LAHTPDTFA

SEQ ID NO: 924 - protein, 9 aa, synthetic construct
LAGEVTKHA

SEQ ID NO: 925 - protein, 9 aa, synthetic construct
LAGDIVRNA

SEQ ID NO: 926 - protein, 9 aa, synthetic construct
LANRWAIDA

SEQ ID NO: 927 - protein, 9 aa, synthetic construct
LANAMEKHA

SEQ ID NO: 928 - protein, 9 aa, synthetic construct
LADENLQAA

SEQ ID NO: 929 - protein, 9 aa, synthetic construct
LATRADIFA

SEQ ID NO: 930 - protein, 9 aa, synthetic construct
LAKDGGKIA

SEQ ID NO: 931 - protein, 9 aa, synthetic construct
LAGKIEENA

SEQ ID NO: 932 - protein, 9 aa, synthetic construct
LAPVKHTWA

SEQ ID NO: 933 - protein, 9 aa, synthetic construct
LAKVASMNA

SEQ ID NO: 934 - protein, 9 aa, synthetic construct
LAQVEVSKA

SEQ ID NO: 935 - protein, 9 aa, synthetic construct
LANLKNFSA

SEQ ID NO: 936 - protein, 9 aa, synthetic construct
LAKGQAQNA

SEQ ID NO: 937 - protein, 9 aa, synthetic construct
LADDQAVNA

SEQ ID NO: 938 - protein, 8 aa, synthetic construct
TSQEKQNS

SEQ ID NO: 939 - protein, 8 aa, synthetic construct
SGPGTSGT

SEQ ID NO: 940 - protein, 8 aa, synthetic construct
TGIATSYS

SEQ ID NO: 941 - protein, 8 aa, synthetic construct
SGREIHFG

SEQ ID NO: 942 - protein, 8 aa, synthetic construct
SGIDTRLG

SEQ ID NO: 943 - protein, 8 aa, synthetic construct
GTMFNNST

SEQ ID NO: 944 - protein, 8 aa, synthetic construct
TTGMERPT

SEQ ID NO: 945 - protein, 8 aa, synthetic construct
TGDERKPG

SEQ ID NO: 946 - protein, 6 aa, synthetic construct
CKEITR

SEQ ID NO: 947 - protein, 6 aa, synthetic construct
PDVSLL

SEQ ID NO: 948 - protein, 6 aa, synthetic construct
NIKKAA

SEQ ID NO: 949 - protein, 6 aa, synthetic construct
RLGRLS

SEQ ID NO: 950 - protein, 6 aa, synthetic construct
KAMRTG

SEQ ID NO: 951 - protein, 6 aa, synthetic construct
KFTKAA

SEQ ID NO: 952 - protein, 6 aa, synthetic construct
RLGKVP

SEQ ID NO: 953 - protein, 9 aa, synthetic construct
LAHGGLREA

SEQ ID NO: 954 - protein, 9 aa, synthetic construct
LAFTHGTNA

SEQ ID NO: 955 - protein, 9 aa, synthetic construct
LADPTETPA

SEQ ID NO: 956 - protein, 9 aa, synthetic construct
LALNDNVGA

SEQ ID NO: 957 - protein, 9 aa, synthetic construct
LAFCIKHCA

SEQ ID NO: 958 - protein, 9 aa, synthetic construct
LAHWQEEWA

SEQ ID NO: 959 - protein, 9 aa, synthetic construct
LAYVIENDA

SEQ ID NO: 960 - protein, 9 aa, synthetic construct
LASTTMNIA

SEQ ID NO: 961 - protein, 9 aa, synthetic construct
LAYVALFYA

SEQ ID NO: 962 - protein, 9 aa, synthetic construct
LAFQQQRCA

SEQ ID NO: 963 - protein, 9 aa, synthetic construct
LADSSKWIA

SEQ ID NO: 964 - protein, 9 aa, synthetic construct
LAVMGNMLA

SEQ ID NO: 965 - protein, 9 aa, synthetic construct
LANANTRPA

SEQ ID NO: 966 - protein, 9 aa, synthetic construct
LAGENHISA

SEQ ID NO: 967 - protein, 9 aa, synthetic construct
LASVSTIQA

SEQ ID NO: 968 - protein, 9 aa, synthetic construct
LAAYHDSAA

SEQ ID NO: 969 - protein, 9 aa, synthetic construct
LAVKGLVNA

SEQ ID NO: 970 - protein, 9 aa, synthetic construct
LADGGTRPA

SEQ ID NO: 971 - protein, 9 aa, synthetic construct
LACYPPTCA

SEQ ID NO: 972 - protein, 9 aa, synthetic construct
LAKVSKGDA

SEQ ID NO: 973 - protein, 9 aa, synthetic construct
LAWKCKGTA

SEQ ID NO: 974 - protein, 9 aa, synthetic construct
LADMTRFHA

SEQ ID NO: 975 - protein, 9 aa, synthetic construct
LAGKTISGA

SEQ ID NO: 976 - protein, 9 aa, synthetic construct
LALKLRTEA

SEQ ID NO: 977 - protein, 9 aa, synthetic construct
LAAVTKDSA

SEQ ID NO: 978 - protein, 9 aa, synthetic construct
LAKDKGLIA

SEQ ID NO: 979 - protein, 9 aa, synthetic construct
LAHHKESIA

SEQ ID NO: 980 - protein, 9 aa, synthetic construct
LAVDIMRGA

SEQ ID NO: 981 - protein, 9 aa, synthetic construct
LANIVQQDA

SEQ ID NO: 982 - protein, 9 aa, synthetic construct
LAGERETVA

SEQ ID NO: 983 - protein, 9 aa, synthetic construct
LADVVSVSA

SEQ ID NO: 984 - protein, 9 aa, synthetic construct
LATPNVNAA

SEQ ID NO: 985 - protein, 9 aa, synthetic construct
LALNAAATA

SEQ ID NO: 986 - protein, 9 aa, synthetic construct
LADCMMINA

SEQ ID NO: 987 - protein, 9 aa, synthetic construct
LAMLACKGA

SEQ ID NO: 988 - protein, 9 aa, synthetic construct
LANMMAAGA

SEQ ID NO: 989 - protein, 9 aa, synthetic construct
LADKNRLQA

SEQ ID NO: 990 - protein, 9 aa, synthetic construct
LAAVGMKMA

SEQ ID NO: 991 - protein, 9 aa, synthetic construct
LADDMIFVA

SEQ ID NO: 992 - protein, 9 aa, synthetic construct
LADIVGESA

SEQ ID NO: 993 - protein, 9 aa, synthetic construct
LAGGKQALA

SEQ ID NO: 994 - protein, 9 aa, synthetic construct
LAQNQKQIA

SEQ ID NO: 995 - protein, 9 aa, synthetic construct
LAETTLTRA

SEQ ID NO: 996 - protein, 9 aa, synthetic construct
LAMLGGTSA

SEQ ID NO: 997 - protein, 9 aa, synthetic construct
LAGFMEYYA

SEQ ID NO: 998 - protein, 9 aa, synthetic construct
LAYGQQTTA

SEQ ID NO: 999 - protein, 9 aa, synthetic construct
LALNNDQSA

SEQ ID NO: 1000 - protein, 9 aa, synthetic construct
LAFLRGPEA

SEQ ID NO: 1001 - protein, 9 aa, synthetic construct
LACPVAEWA

SEQ ID NO: 1002 - protein, 9 aa, synthetic construct
LALETTQRA

SEQ ID NO: 1003 - protein, 9 aa, synthetic construct
LADTYKPYA

SEQ ID NO: 1004 - protein, 9 aa, synthetic construct
LAKRDKPTA

SEQ ID NO: 1005 - protein, 9 aa, synthetic construct
LAYFHSYAA

SEQ ID NO: 1006 - protein, 9 aa, synthetic construct
LAMTNTFLA

SEQ ID NO: 1007 - protein, 9 aa, synthetic construct
LAGESSYLA

SEQ ID NO: 1008 - protein, 9 aa, synthetic construct
LAAEHIGRA

SEQ ID NO: 1009 - protein, 9 aa, synthetic construct
LADWRTTPA

SEQ ID NO: 1010 - protein, 9 aa, synthetic construct
LAEGLSQFA

SEQ ID NO: 1011 - protein, 9 aa, synthetic construct
LAKPTGKDA

SEQ ID NO: 1012 - protein, 8 aa, synthetic construct
TGEGPTKG

SEQ ID NO: 1013 - protein, 6 aa, synthetic construct
RALKIS

SEQ ID NO: 1014 - protein, 6 aa, synthetic construct
NSKKLG

SEQ ID NO: 1015 - protein, 6 aa, synthetic construct
HFPVFS

SEQ ID NO: 1016 - protein, 9 aa, synthetic construct
LATDRTKTA

SEQ ID NO: 1017 - protein, 9 aa, synthetic construct
LAVDNIWAA

SEQ ID NO: 1018 - protein, 9 aa, synthetic construct
LAGQAMMQA

SEQ ID NO: 1019 - protein, 9 aa, synthetic construct
LAMTKITDA

SEQ ID NO: 1020 - protein, 9 aa, synthetic construct
LAGGEYETA

SEQ ID NO: 1021 - protein, 9 aa, synthetic construct
LAALVDANA

SEQ ID NO: 1022 - protein, 9 aa, synthetic construct
LALENIGQA

SEQ ID NO: 1023 - protein, 9 aa, synthetic construct
LAHRAPDSA

SEQ ID NO: 1024 - protein, 9 aa, synthetic construct
LAEGQEDSA

SEQ ID NO: 1025 - protein, 9 aa, synthetic construct
LAPHIAKDA

SEQ ID NO: 1026 - protein, 9 aa, synthetic construct
LARDQLKLA

SEQ ID NO: 1027 - protein, 9 aa, synthetic construct
LALNSGKMA

SEQ ID NO: 1028 - protein, 9 aa, synthetic construct
LAVSRHGEA

SEQ ID NO: 1029 - protein, 9 aa, synthetic construct
LAMNEPVTA

SEQ ID NO: 1030 - protein, 9 aa, synthetic construct
LAYITEKSA

SEQ ID NO: 1031 - protein, 9 aa, synthetic construct
LAYDAGGHA

SEQ ID NO: 1032 - protein, 9 aa, synthetic construct
LALHQERQA

SEQ ID NO: 1033 - protein, 9 aa, synthetic construct
LAAKPKDGA

SEQ ID NO: 1034 - protein, 9 aa, synthetic construct
LAEYHNNDA

SEQ ID NO: 1035 - protein, 9 aa, synthetic construct
LATWCLVWA

SEQ ID NO: 1036 - protein, 9 aa, synthetic construct
LAFGFSADA

SEQ ID NO: 1037 - protein, 9 aa, synthetic construct
LAGVVKTDA

SEQ ID NO: 1038 - protein, 9 aa, synthetic construct
LAKFMWIHA

SEQ ID NO: 1039 - protein, 9 aa, synthetic construct
LANQGFLTA

SEQ ID NO: 1040 - protein, 9 aa, synthetic construct
LAHDLHGGA

SEQ ID NO: 1041 - protein, 9 aa, synthetic construct
LASENLNRA

SEQ ID NO: 1042 - protein, 9 aa, synthetic construct
LAFRTMEYA

SEQ ID NO: 1043 - protein, 9 aa, synthetic construct
LAAANHDNA

SEQ ID NO: 1044 - protein, 9 aa, synthetic construct
LAPSKMGLA

SEQ ID NO: 1045 - protein, 9 aa, synthetic construct
LANEGTIRA

SEQ ID NO: 1046 - protein, 9 aa, synthetic construct
LARGTLMTA

SEQ ID NO: 1047 - protein, 9 aa, synthetic construct
LATKSTGSA

SEQ ID NO: 1048 - protein, 9 aa, synthetic construct
LAALNSQTA

SEQ ID NO: 1049 - protein, 9 aa, synthetic construct
LANVTLQSA

SEQ ID NO: 1050 - protein, 9 aa, synthetic construct
LAAGQAQSA

SEQ ID NO: 1051 - protein, 9 aa, synthetic construct
LAHDWGAPA

SEQ ID NO: 1052 - protein, 9 aa, synthetic construct
LAMDREIKA

SEQ ID NO: 1053 - protein, 9 aa, synthetic construct
LANADFPLA

SEQ ID NO: 1054 - protein, 9 aa, synthetic construct
LAHQGAIIA

SEQ ID NO: 1055 - protein, 9 aa, synthetic construct
LAPNTPKIA

SEQ ID NO: 1056 - protein, 9 aa, synthetic construct
LAIPVEANA

SEQ ID NO: 1057 - protein, 9 aa, synthetic construct
LAIGERTTA

SEQ ID NO: 1058 - protein, 9 aa, synthetic construct
LACRSDCVA

SEQ ID NO: 1059 - protein, 9 aa, synthetic construct
LANRLSNVA

SEQ ID NO: 1060 - protein, 9 aa, synthetic construct
LAQEQNAAA

SEQ ID NO: 1061 - protein, 9 aa, synthetic construct
LARSSTLNA

SEQ ID NO: 1062 - protein, 9 aa, synthetic construct
LAMKYVFDA

SEQ ID NO: 1063 - protein, 9 aa, synthetic construct
LAQEAKLTA

SEQ ID NO: 1064 - protein, 9 aa, synthetic construct
LAREDHRQA

SEQ ID NO: 1065 - protein, 9 aa, synthetic construct
LAHYPSAPA

SEQ ID NO: 1066 - protein, 9 aa, synthetic construct
LAKGMKEGA

SEQ ID NO: 1067 - protein, 8 aa, synthetic construct
TSHVSTSS

SEQ ID NO: 1068 - protein, 8 aa, synthetic construct
SGVLFTEG

SEQ ID NO: 1069 - protein, 8 aa, synthetic construct
TSGMGAIG

SEQ ID NO: 1070 - protein, 8 aa, synthetic construct
TGDSEQQT

SEQ ID NO: 1071 - protein, 8 aa, synthetic construct
SGSVGYVG

SEQ ID NO: 1072 - protein, 8 aa, synthetic construct
SSENNKGG

SEQ ID NO: 1073 - protein, 8 aa, synthetic construct
SGPGTSGT

SEQ ID NO: 1074 - protein, 8 aa, synthetic construct
TTENHKPG

SEQ ID NO: 1075 - protein, 6 aa, synthetic construct
FNKVLH

SEQ ID NO: 1076 - protein, 6 aa, synthetic construct
RTGRNT

SEQ ID NO: 1077 - protein, 6 aa, synthetic construct
RLGKVP

SEQ ID NO: 1078 - protein, 9 aa, synthetic construct
LAWIERSMA

SEQ ID NO: 1079 - protein, 9 aa, synthetic construct
LAYDNTAEA

SEQ ID NO: 1080 - protein, 9 aa, synthetic construct
LAQVTEMRA

SEQ ID NO: 1081 - protein, 9 aa, synthetic construct
LATRADIFA

SEQ ID NO: 1082 - protein, 9 aa, synthetic construct
LAKDGGKIA

SEQ ID NO: 1083 - protein, 9 aa, synthetic construct
LAQVEVSKA

SEQ ID NO: 1084 - protein, 9 aa, synthetic construct
LADTYKPYA

SEQ ID NO: 1085 - protein, 9 aa, synthetic construct
LAQEAKLTA

SEQ ID NO: 1086 - protein, 9 aa, synthetic construct
LACRSDCVA

SEQ ID NO: 1087 - protein, 9 aa, synthetic construct
LAKDHHVIA

SEQ ID NO: 1088 - protein, 9 aa, synthetic construct
LAEPPDPPA

SEQ ID NO: 1089 - protein, 9 aa, synthetic construct
LACSSTWYA

SEQ ID NO: 1090 - protein, 9 aa, synthetic construct
LADLTLRAA

SEQ ID NO: 1091 - protein, 9 aa, synthetic construct
LAKVASMNA

SEQ ID NO: 1092 - protein, 9 aa, synthetic construct
LAAQDVSWA

SEQ ID NO: 1093 - protein, 9 aa, synthetic construct
LADVGCENA

SEQ ID NO: 1094 - protein, 8 aa, synthetic construct
TGPGTHNG

SEQ ID NO: 1095 - protein, 8 aa, synthetic construct
STVPLNMG

SEQ ID NO: 1096 - protein, 6 aa, synthetic construct
HSKDGA

SEQ ID NO: 1097 - protein, 6 aa, synthetic construct
RTGRNT

SEQ ID NO: 1098 - protein, 6 aa, synthetic construct
NSKKLG

SEQ ID NO: 1099 - protein, 6 aa, synthetic construct
RPGRVS

SEQ ID NO: 1100 - protein, 6 aa, synthetic construct
KFRHTE

SEQ ID NO: 1101 - protein, 6 aa, synthetic construct
KAMRTG

SEQ ID NO: 1102 - protein, 6 aa, synthetic construct
NIKKAA

SEQ ID NO: 1103 - protein, 6 aa, synthetic construct
KFTKAA

SEQ ID NO: 1104 - DNA, 24 bp, synthetic construct
  source 1..24: mol_type = other DNA
accggctacagcagcaccaacggc

SEQ ID NO: 1105 - DNA, 27 bp, synthetic construct
  source 1..27: mol_type = other DNA
ctagcagacctgagcgaccaccacgct

SEQ ID NO: 1106 - DNA, 24 bp, synthetic construct
  source 1..24: mol_type = other DNA
agcggcaccgaggccacccggggc

SEQ ID NO: 1107 - DNA, 24 bp, synthetic construct
  source 1..24: mol_type = other DNA
accggccaggacaagcccaccggc

SEQ ID NO: 1108 - DNA, 24 bp, synthetic construct
  source 1..24: mol_type = other DNA
agcagcatggacccccggcacggc

SEQ ID NO: 1109 - DNA, 27 bp, synthetic construct
  source 1..27: mol_type = other DNA
ctagcaaacctgaaggagaacgaggct

SEQ ID NO: 1110 - DNA, 27 bp, synthetic construct
  source 1..27: mol_type = other DNA
ctagcaatcaagatgatcgcctacgct

SEQ ID NO: 1111 - DNA, 24 bp, synthetic construct
  source 1..24: mol_type = other DNA
accggcgagggccccaccaagggc

SEQ ID NO: 1112 - DNA, 24 bp, synthetic construct
  source 1..24: mol_type = other DNA
agcggcagcgtgggctacgtgggc

SEQ ID NO: 1113 - DNA, 27 bp, synthetic construct
  source 1..27: mol_type = other DNA
ctagcacaggtgcaggtggagggcgct

SEQ ID NO: 1114 - DNA, 24 bp, synthetic construct
  source 1..24: mol_type = other DNA
agcggcttcgacgccaccaagggc

SEQ ID NO: 1115 - DNA, 24 bp, synthetic construct
  source 1..24: mol_type = other DNA
accaccgacctgaaccacaagggc

SEQ ID NO: 1116 - DNA, 24 bp, synthetic construct
  source 1..24: mol_type = other DNA
agcagccgggcctaccaggagacc

SEQ ID NO: 1117 - DNA, 27 bp, synthetic construct
  source 1..27: mol_type = other DNA
ctagcaaaggtggccagcatgaacgct

SEQ ID NO: 1118 - DNA, 24 bp, synthetic construct
  source 1..24: mol_type = other DNA
accagccaggagaagcagaacagc

SEQ ID NO: 1119 - DNA, 27 bp, synthetic construct
  source 1..27: mol_type = other DNA
ctagcagcccaccagatggccagcgct

SEQ ID NO: 1120 - DNA, 27 bp, synthetic construct
  source 1..27: mol_type = other DNA
ctagcaaagggccaggcccagaacgct

SEQ ID NO: 1121 - DNA, 18 bp, synthetic construct
  source 1..18: mol_type = other DNA
cggaccggccggaacacc

SEQ ID NO: 1122 - DNA, 27 bp, synthetic construct
  source 1..27: mol_type = other DNA
ctagcaaccaccaccatgggcaccgct

SEQ ID NO: 1123 - DNA, 27 bp, synthetic construct
  source 1..27: mol_type = other DNA
ctagcacggcggaagagcaacgaggct

SEQ ID NO: 1124 - DNA, 27 bp, synthetic construct
  source 1..27: mol_type = other DNA
ctagcacacggcggcctgcgggaggct

SEQ ID NO: 1125 - DNA, 27 bp, synthetic construct
  source 1..27: mol_type = other DNA
ctagcaatgttcgtgtgggtgcccgct

SEQ ID NO: 1126 - DNA, 27 bp, synthetic construct
  source 1..27: mol_type = other DNA
ctagcaaccgaccggaccaagaccgct

SEQ ID NO: 1127 - DNA, 27 bp, synthetic construct
  source 1..27: mol_type = other DNA
ctagcattcaacagctgcagctacgct

SEQ ID NO: 1128 - DNA, 27 bp, synthetic construct
  source 1..27: mol_type = other DNA
ctagcatacgccgagcagagcaaggct

SEQ ID NO: 1129 - DNA, 27 bp, synthetic construct
  source 1..27: mol_type = other DNA
ctagcatggcggatcatgaagcacgct

SEQ ID NO: 1130 - DNA, 27 bp, synthetic construct
  source 1..27: mol_type = other DNA
ctagcagtggacaacatctgggccgct

SEQ ID NO: 1131 - DNA, 27 bp, synthetic construct
  source 1..27: mol_type = other DNA
ctagcaggccaggccatgatgcaggct

SEQ ID NO: 1132 - DNA, 27 bp, synthetic construct
  source 1..27: mol_type = other DNA
ctagcagagctggccctgatcaaggct

SEQ ID NO: 1133 - DNA, 27 bp, synthetic construct
  source 1..27: mol_type = other DNA
ctagcaatgaccaagatcaccgacgct

SEQ ID NO: 1134 - DNA, 27 bp, synthetic construct
  source 1..27: mol_type = other DNA
ctagcactggagaacatcggccaggct

SEQ ID NO: 1135 - DNA, 27 bp, synthetic construct
  source 1..27: mol_type = other DNA
ctagcattcacccacggcaccaacgct

SEQ ID NO: 1136 - DNA, 27 bp, synthetic construct
  source 1..27: mol_type = other DNA
ctagcaaagatcaacgcccagcccgct

SEQ ID NO: 1137 - DNA, 27 bp, synthetic construct
  source 1..27: mol_type = other DNA
ctagcagacctgagcgaccaccacgct

SEQ ID NO: 1138 - DNA, 27 bp, synthetic construct
  source 1..27: mol_type = other DNA
ctagcagaccccctgtacgccgtggct

SEQ ID NO: 1139 - DNA, 27 bp, synthetic construct
  source 1..27: mol_type = other DNA
ctagcatacgtggccctgttctacgct

SEQ ID NO: 1140 - DNA, 27 bp, synthetic construct
  source 1..27: mol_type = other DNA
ctagcaggcggcgagtacgagaccgct

SEQ ID NO: 1141 - DNA, 27 bp, synthetic construct
  source 1..27: mol_type = other DNA
ctagcagccctggtggacgccaacgct

SEQ ID NO: 1142 - DNA, 27 bp, synthetic construct
  source 1..27: mol_type = other DNA
ctagcagaccccaccgagacccccgct

SEQ ID NO: 1143 - DNA, 27 bp, synthetic construct
  source 1..27: mol_type = other DNA
ctagcacaccgggcccccgacagcgct

SEQ ID NO: 1144 - DNA, 27 bp, synthetic construct
  source 1..27: mol_type = other DNA
ctagcagagggccaggaggacagcgct

SEQ ID NO: 1145 - DNA, 27 bp, synthetic construct
  source 1..27: mol_type = other DNA
ctagcagaggaggagaagtacggcgct

SEQ ID NO: 1146 - DNA, 27 bp, synthetic construct
  source 1..27: mol_type = other DNA
ctagcactgaacgacaacgtgggcgct

SEQ ID NO: 1147 - DNA, 27 bp, synthetic construct
  source 1..27: mol_type = other DNA
ctagcacccgacgccaaggactgggct

SEQ ID NO: 1148 - DNA, 27 bp, synthetic construct
  source 1..27: mol_type = other DNA
ctagcaccccacatcgccaaggacgct

SEQ ID NO: 1149 - DNA, 27 bp, synthetic construct
  source 1..27: mol_type = other DNA
ctagcagaccccggctggaagtacgct

SEQ ID NO: 1150 - DNA, 27 bp, synthetic construct
  source 1..27: mol_type = other DNA
ctagcaagccggaccgccgtggccgct

SEQ ID NO: 1151 - DNA, 27 bp, synthetic construct
  source 1..27: mol_type = other DNA
ctagcattctgcatcaagcactgcgct

SEQ ID NO: 1152 - DNA, 27 bp, synthetic construct
  source 1..27: mol_type = other DNA
ctagcagagcccgaccacaccttggct

SEQ ID NO: 1153 - DNA, 27 bp, synthetic construct
  source 1..27: mol_type = other DNA
ctagcacccatgcggggcgtgtacgct

SEQ ID NO: 1154 - DNA, 27 bp, synthetic construct
  source 1..27: mol_type = other DNA
ctagcagccgtgaccaaggacagcgct

SEQ ID NO: 1155 - DNA, 27 bp, synthetic construct
  source 1..27: mol_type = other DNA
ctagcaatcacccagagcgacatcgct

SEQ ID NO: 1156 - DNA, 27 bp, synthetic construct
  source 1..27: mol_type = other DNA
ctagcacccaaccagggcacccccgct

SEQ ID NO: 1157 - DNA, 27 bp, synthetic construct
  source 1..27: mol_type = other DNA
ctagcagtgatgggcaacatgctggct

SEQ ID NO: 1158 - DNA, 27 bp, synthetic construct
  source 1..27: mol_type = other DNA
ctagcaagcaacatggagcggatcgct

SEQ ID NO: 1159 - DNA, 27 bp, synthetic construct
  source 1..27: mol_type = other DNA
ctagcacactggcaggaggagtgggct

SEQ ID NO: 1160 - DNA, 27 bp, synthetic construct
  source 1..27: mol_type = other DNA
ctagcagacgacatgatcttcgtggct

SEQ ID NO: 1161 - DNA, 27 bp, synthetic construct
  source 1..27: mol_type = other DNA
ctagcacacgagcccatgttcaacgct

SEQ ID NO: 1162 - DNA, 27 bp, synthetic construct
  source 1..27: mol_type = other DNA
ctagcaaccgtgtacaagagccccgct

SEQ ID NO: 1163 - DNA, 27 bp, synthetic construct
  source 1..27: mol_type = other DNA
ctagcagacaacctgaacacccccgct

SEQ ID NO: 1164 - DNA, 27 bp, synthetic construct
  source 1..27: mol_type = other DNA
ctagcatacgtgatcgagaacgacgct

SEQ ID NO: 1165 - DNA, 27 bp, synthetic construct
  source 1..27: mol_type = other DNA
ctagcactggaggtgggcgaccacgct

SEQ ID NO: 1166 - DNA, 27 bp, synthetic construct
  source 1..27: mol_type = other DNA
ctagcacacgagggccggcaggccgct

SEQ ID NO: 1167 - DNA, 27 bp, synthetic construct
  source 1..27: mol_type = other DNA
ctagcaagcaccaccatgaacatcgct

SEQ ID NO: 1168 - DNA, 27 bp, synthetic construct
  source 1..27: mol_type = other DNA
ctagcagagttccacatccccaccgct

SEQ ID NO: 1169 - DNA, 27 bp, synthetic construct
  source 1..27: mol_type = other DNA
ctagcagagttccgggtgggccaggct

SEQ ID NO: 1170 - DNA, 27 bp, synthetic construct
  source 1..27: mol_type = other DNA
ctagcagacgcccacagcgtgaccgct

SEQ ID NO: 1171 - DNA, 27 bp, synthetic construct
  source 1..27: mol_type = other DNA
ctagcaaagcccccccccaaggacgct

SEQ ID NO: 1172 - DNA, 27 bp, synthetic construct
  source 1..27: mol_type = other DNA
ctagcaatcggcagcgacaccagcgct

SEQ ID NO: 1173 - DNA, 27 bp, synthetic construct
  source 1..27: mol_type = other DNA
ctagcattccagcagcagcggtgcgct

SEQ ID NO: 1174 - DNA, 27 bp, synthetic construct
  source 1..27: mol_type = other DNA
ctagcagccgtgcacctgatgggcgct

SEQ ID NO: 1175 - DNA, 27 bp, synthetic construct
  source 1..27: mol_type = other DNA
ctagcatgcacctacacctacgccgct

SEQ ID NO: 1176 - DNA, 27 bp, synthetic construct
  source 1..27: mol_type = other DNA
ctagcagtgcggaacgagatcaacgct

SEQ ID NO: 1177 - DNA, 27 bp, synthetic construct
  source 1..27: mol_type = other DNA
ctagcagacagcagcaagtggatcgct

SEQ ID NO: 1178 - DNA, 27 bp, synthetic construct
  source 1..27: mol_type = other DNA
ctagcagactaccggaacgacaaggct

SEQ ID NO: 1179 - DNA, 27 bp, synthetic construct
  source 1..27: mol_type = other DNA
ctagcaaacgccaacacccggcccgct

SEQ ID NO: 1180 - DNA, 27 bp, synthetic construct
  source 1..27: mol_type = other DNA
ctagcaccccagaacctggacgaggct

SEQ ID NO: 1181 - DNA, 27 bp, synthetic construct
  source 1..27: mol_type = other DNA
ctagcacaccccggcaccaccttcgct

SEQ ID NO: 1182 - DNA, 27 bp, synthetic construct
  source 1..27: mol_type = other DNA
ctagcatacgacgccggcggccacgct

SEQ ID NO: 1183 - DNA, 27 bp, synthetic construct
  source 1..27: mol_type = other DNA
ctagcaaaggccctgggcatggaggct

SEQ ID NO: 1184 - DNA, 27 bp, synthetic construct
  source 1..27: mol_type = other DNA
ctagcaggcgagaaccacatcagcgct

SEQ ID NO: 1185 - DNA, 27 bp, synthetic construct
  source 1..27: mol_type = other DNA
ctagcacgggaccagctgaagctggct

SEQ ID NO: 1186 - DNA, 27 bp, synthetic construct
  source 1..27: mol_type = other DNA
ctagcatgccccgtggccgagtgggct

SEQ ID NO: 1187 - DNA, 27 bp, synthetic construct
  source 1..27: mol_type = other DNA
ctagcacaggtgaagcagggccccgct

SEQ ID NO: 1188 - DNA, 27 bp, synthetic construct
  source 1..27: mol_type = other DNA
ctagcactgcccgagggccggttcgct

SEQ ID NO: 1189 - DNA, 27 bp, synthetic construct
  source 1..27: mol_type = other DNA
ctagcaatgaacgagcccgtgaccgct

SEQ ID NO: 1190 - DNA, 27 bp, synthetic construct
  source 1..27: mol_type = other DNA
ctagcagccgtgaccgagtacgtggct

SEQ ID NO: 1191 - DNA, 27 bp, synthetic construct
  source 1..27: mol_type = other DNA
ctagcagacggcggcacccggcccgct

SEQ ID NO: 1192 - DNA, 27 bp, synthetic construct
  source 1..27: mol_type = other DNA
ctagcaccccccggcaaccccctggct

SEQ ID NO: 1193 - DNA, 27 bp, synthetic construct
  source 1..27: mol_type = other DNA
ctagcaaacatcgtgcagcaggacgct

SEQ ID NO: 1194 - DNA, 27 bp, synthetic construct
  source 1..27: mol_type = other DNA
ctagcagtgagccggcacggcgaggct

SEQ ID NO: 1195 - DNA, 27 bp, synthetic construct
  source 1..27: mol_type = other DNA
ctagcaaacgaggcccagggcaaggct

SEQ ID NO: 1196 - DNA, 27 bp, synthetic construct
  source 1..27: mol_type = other DNA
ctagcacccatgggccagaacatggct

SEQ ID NO: 1197 - DNA, 27 bp, synthetic construct
  source 1..27: mol_type = other DNA
ctagcagcctaccacgacagcgccgct

SEQ ID NO: 1198 - DNA, 27 bp, synthetic construct
  source 1..27: mol_type = other DNA
ctagcaggcatccagcagcacgtggct

SEQ ID NO: 1199 - DNA, 27 bp, synthetic construct
  source 1..27: mol_type = other DNA
ctagcaagcgtgagcaccatccaggct

SEQ ID NO: 1200 - DNA, 27 bp, synthetic construct
  source 1..27: mol_type = other DNA
ctagcagccgtgggcatgaagatggct

SEQ ID NO: 1201 - DNA, 27 bp, synthetic construct
  source 1..27: mol_type = other DNA
ctagcacaggtgaccgagatgcgggct

SEQ ID NO: 1202 - DNA, 27 bp, synthetic construct
  source 1..27: mol_type = other DNA
ctagcagacacccacaccacctacgct

SEQ ID NO: 1203 - DNA, 27 bp, synthetic construct
  source 1..27: mol_type = other DNA
ctagcaatcggcgagcggaccaccgct

SEQ ID NO: 1204 - DNA, 27 bp, synthetic construct
  source 1..27: mol_type = other DNA
ctagcaaacaagaacaccgccatcgct

SEQ ID NO: 1205 - DNA, 27 bp, synthetic construct
  source 1..27: mol_type = other DNA
ctagcaaacctgaaggagaacgaggct

SEQ ID NO: 1206 - DNA, 27 bp, synthetic construct
  source 1..27: mol_type = other DNA
ctagcagagtaccacaacaacgacgct

SEQ ID NO: 1207 - DNA, 27 bp, synthetic construct
  source 1..27: mol_type = other DNA
ctagcattcaacggcagcaccagcgct

SEQ ID NO: 1208 - DNA, 27 bp, synthetic construct
  source 1..27: mol_type = other DNA
ctagcaggcttcatggagtactacgct

SEQ ID NO: 1209 - DNA, 27 bp, synthetic construct
  source 1..27: mol_type = other DNA
ctagcaatgggccacaactacgtggct

SEQ ID NO: 1210 - DNA, 27 bp, synthetic construct
  source 1..27: mol_type = other DNA
ctagcaggcgagttcaccggcaaggct

SEQ ID NO: 1211 - DNA, 27 bp, synthetic construct
  source 1..27: mol_type = other DNA
ctagcaaagggcttcaagaccgaggct

SEQ ID NO: 1212 - DNA, 27 bp, synthetic construct
  source 1..27: mol_type = other DNA
ctagcatggaacaagtgcccctacgct

SEQ ID NO: 1213 - DNA, 27 bp, synthetic construct
  source 1..27: mol_type = other DNA
ctagcacaggagcagaacgccgccgct

SEQ ID NO: 1214 - DNA, 27 bp, synthetic construct
  source 1..27: mol_type = other DNA
ctagcaaaggacggcatgatcggcgct

SEQ ID NO: 1215 - DNA, 27 bp, synthetic construct
  source 1..27: mol_type = other DNA
ctagcacccaccaccatcggcggcgct

SEQ ID NO: 1216 - DNA, 27 bp, synthetic construct
  source 1..27: mol_type = other DNA
ctagcagtgaagggcctggtgaacgct

SEQ ID NO: 1217 - DNA, 27 bp, synthetic construct
  source 1..27: mol_type = other DNA
ctagcactgaacagcggcaagatggct

SEQ ID NO: 1218 - DNA, 27 bp, synthetic construct
  source 1..27: mol_type = other DNA
ctagcactgtaccagtgcgacaccgct

SEQ ID NO: 1219 - DNA, 27 bp, synthetic construct
  source 1..27: mol_type = other DNA
ctagcaccccagaagcagcccgtggct

SEQ ID NO: 1220 - DNA, 27 bp, synthetic construct
  source 1..27: mol_type = other DNA
ctagcagagcacaagaacatgcacgct

SEQ ID NO: 1221 - DNA, 27 bp, synthetic construct
  source 1..27: mol_type = other DNA
ctagcagagttcgacggcgacggcgct

SEQ ID NO: 1222 - DNA, 27 bp, synthetic construct
  source 1..27: mol_type = other DNA
ctagcaagccggctgaacagccccgct

SEQ ID NO: 1223 - DNA, 27 bp, synthetic construct
  source 1..27: mol_type = other DNA
ctagcaccctgctacgagccccccgct

SEQ ID NO: 1224 - DNA, 27 bp, synthetic construct
  source 1..27: mol_type = other DNA
ctagcactgaagctgcggaccgaggct

SEQ ID NO: 1225 - DNA, 27 bp, synthetic construct
  source 1..27: mol_type = other DNA
ctagcagccggccaggcccagagcgct

SEQ ID NO: 1226 - DNA, 27 bp, synthetic construct
  source 1..27: mol_type = other DNA
ctagcaacccccaacgtgaacgccgct

SEQ ID NO: 1227 - DNA, 27 bp, synthetic construct
  source 1..27: mol_type = other DNA
ctagcacgggccatcaccaacgaggct

SEQ ID NO: 1228 - DNA, 27 bp, synthetic construct
  source 1..27: mol_type = other DNA
ctagcagaggtgacctacaccggcgct

SEQ ID NO: 1229 - DNA, 27 bp, synthetic construct
  source 1..27: mol_type = other DNA
ctagcacccagcggcgaccggcacgct

SEQ ID NO: 1230 - DNA, 27 bp, synthetic construct
  source 1..27: mol_type = other DNA
ctagcatacatcaccgagaagagcgct

SEQ ID NO: 1231 - DNA, 27 bp, synthetic construct
  source 1..27: mol_type = other DNA
ctagcaaaggaccaccacgtgatcgct

SEQ ID NO: 1232 - DNA, 27 bp, synthetic construct
  source 1..27: mol_type = other DNA
ctagcaagcgccgaccaccagcccgct

SEQ ID NO: 1233 - DNA, 27 bp, synthetic construct
  source 1..27: mol_type = other DNA
ctagcaaccatgcacaacttcgaggct

SEQ ID NO: 1234 - DNA, 27 bp, synthetic construct
  source 1..27: mol_type = other DNA
ctagcacggggcgtggcccccatcgct

SEQ ID NO: 1235 - DNA, 27 bp, synthetic construct
  source 1..27: mol_type = other DNA
ctagcatggaagtgcaagggcaccgct

SEQ ID NO: 1236 - DNA, 27 bp, synthetic construct
  source 1..27: mol_type = other DNA
ctagcaaagggcatcctgatggaggct

SEQ ID NO: 1237 - DNA, 27 bp, synthetic construct
  source 1..27: mol_type = other DNA
ctagcaaacatcgtgagccacgacgct

SEQ ID NO: 1238 - DNA, 27 bp, synthetic construct
  source 1..27: mol_type = other DNA
ctagcagagttcgtgcacaagggcgct

SEQ ID NO: 1239 - DNA, 27 bp, synthetic construct
  source 1..27: mol_type = other DNA
ctagcaagcgccgtgatgtactgggct

SEQ ID NO: 1240 - DNA, 27 bp, synthetic construct
  source 1..27: mol_type = other DNA
ctagcacagaagaagctgctggaggct

SEQ ID NO: 1241 - DNA, 27 bp, synthetic construct
  source 1..27: mol_type = other DNA
ctagcaggcgagcgggagaccgtggct

SEQ ID NO: 1242 - DNA, 27 bp, synthetic construct
  source 1..27: mol_type = other DNA
ctagcattcctgcggggccccgaggct

SEQ ID NO: 1243 - DNA, 27 bp, synthetic construct
  source 1..27: mol_type = other DNA
ctagcagccgtgggcgtgggctacgct

SEQ ID NO: 1244 - DNA, 27 bp, synthetic construct
  source 1..27: mol_type = other DNA
ctagcagacctgggctaccccaacgct

SEQ ID NO: 1245 - DNA, 27 bp, synthetic construct
  source 1..27: mol_type = other DNA
ctagcagccaagcccaaggacggcgct

SEQ ID NO: 1246 - DNA, 27 bp, synthetic construct
  source 1..27: mol_type = other DNA
ctagcagacaagaaccggctgcaggct

SEQ ID NO: 1247 - DNA, 27 bp, synthetic construct
  source 1..27: mol_type = other DNA
ctagcagacatgacccggttccacgct

SEQ ID NO: 1248 - DNA, 27 bp, synthetic construct
  source 1..27: mol_type = other DNA
ctagcacggagcagcaccctgaacgct

SEQ ID NO: 1249 - DNA, 27 bp, synthetic construct
  source 1..27: mol_type = other DNA
ctagcatgctacccccccacctgcgct

SEQ ID NO: 1250 - DNA, 27 bp, synthetic construct
  source 1..27: mol_type = other DNA
ctagcaaaggtgagcaagggcgacgct

SEQ ID NO: 1251 - DNA, 27 bp, synthetic construct
  source 1..27: mol_type = other DNA
ctagcaggcggcaagcaggccctggct

SEQ ID NO: 1252 - DNA, 27 bp, synthetic construct
  source 1..27: mol_type = other DNA
ctagcagacatcgtgggcgagagcgct

SEQ ID NO: 1253 - DNA, 27 bp, synthetic construct
  source 1..27: mol_type = other DNA
ctagcagacttccccagcgagaaggct

SEQ ID NO: 1254 - DNA, 27 bp, synthetic construct
  source 1..27: mol_type = other DNA
ctagcacacatccaggagcccaaggct

SEQ ID NO: 1255 - DNA, 27 bp, synthetic construct
  source 1..27: mol_type = other DNA
ctagcagccgccaaccacgacaacgct

SEQ ID NO: 1256 - DNA, 27 bp, synthetic construct
  source 1..27: mol_type = other DNA
ctagcagccctgaacagccagaccgct

SEQ ID NO: 1257 - DNA, 27 bp, synthetic construct
  source 1..27: mol_type = other DNA
ctagcagagcccttccccgtggccgct

SEQ ID NO: 1258 - DNA, 27 bp, synthetic construct
  source 1..27: mol_type = other DNA
ctagcagagctggacttcaagtgggct

SEQ ID NO: 1259 - DNA, 27 bp, synthetic construct
  source 1..27: mol_type = other DNA
ctagcaaagttcatgtggatccacgct

SEQ ID NO: 1260 - DNA, 27 bp, synthetic construct
  source 1..27: mol_type = other DNA
ctagcacaggtgcaggtggagggcgct

SEQ ID NO: 1261 - DNA, 27 bp, synthetic construct
  source 1..27: mol_type = other DNA
ctagcagacatcctggtgggccaggct

SEQ ID NO: 1262 - DNA, 27 bp, synthetic construct
  source 1..27: mol_type = other DNA
ctagcacagtggttcctgtggcgggct

SEQ ID NO: 1263 - DNA, 27 bp, synthetic construct
  source 1..27: mol_type = other DNA
ctagcactgcaccaggagcggcaggct

SEQ ID NO: 1264 - DNA, 27 bp, synthetic construct
  source 1..27: mol_type = other DNA
ctagcatgcagcagcacctggtacgct

SEQ ID NO: 1265 - DNA, 27 bp, synthetic construct
  source 1..27: mol_type = other DNA
ctagcaggcagcatggccaagctggct

SEQ ID NO: 1266 - DNA, 27 bp, synthetic construct
  source 1..27: mol_type = other DNA
ctagcacccaacacccccaagatcgct

SEQ ID NO: 1267 - DNA, 27 bp, synthetic construct
  source 1..27: mol_type = other DNA
ctagcactggacatgtgggagcccgct

SEQ ID NO: 1268 - DNA, 27 bp, synthetic construct
  source 1..27: mol_type = other DNA
ctagcaggccacgccgcctgcttcgct

SEQ ID NO: 1269 - DNA, 27 bp, synthetic construct
  source 1..27: mol_type = other DNA
ctagcagtgcggaccggcagcatggct

SEQ ID NO: 1270 - DNA, 27 bp, synthetic construct
  source 1..27: mol_type = other DNA
ctagcaggcgtggtgaagaccgacgct

SEQ ID NO: 1271 - DNA, 27 bp, synthetic construct
  source 1..27: mol_type = other DNA
ctagcaaagttcgccgccaaggacgct

SEQ ID NO: 1272 - DNA, 27 bp, synthetic construct
  source 1..27: mol_type = other DNA
ctagcagtgaaccgggtggacatggct

SEQ ID NO: 1273 - DNA, 27 bp, synthetic construct
  source 1..27: mol_type = other DNA
ctagcaaacaacgccgagcccagcgct

SEQ ID NO: 1274 - DNA, 27 bp, synthetic construct
  source 1..27: mol_type = other DNA
ctagcagccaagatgtacaacggcgct

SEQ ID NO: 1275 - DNA, 27 bp, synthetic construct
  source 1..27: mol_type = other DNA
ctagcagaggccgacaagtggtacgct

SEQ ID NO: 1276 - DNA, 27 bp, synthetic construct
  source 1..27: mol_type = other DNA
ctagcacggggcaccctgatgaccgct

SEQ ID NO: 1277 - DNA, 27 bp, synthetic construct
  source 1..27: mol_type = other DNA
ctagcaaaggacaagggcctgatcgct

SEQ ID NO: 1278 - DNA, 27 bp, synthetic construct
  source 1..27: mol_type = other DNA
ctagcacagggcaacaacaccggcgct

SEQ ID NO: 1279 - DNA, 27 bp, synthetic construct
  source 1..27: mol_type = other DNA
ctagcatggatcgagcggagcatggct

SEQ ID NO: 1280 - DNA, 27 bp, synthetic construct
  source 1..27: mol_type = other DNA
ctagcatacgacaacaccgccgaggct

SEQ ID NO: 1281 - DNA, 27 bp, synthetic construct
  source 1..27: mol_type = other DNA
ctagcaggcttccacgccatcgaggct

SEQ ID NO: 1282 - DNA, 27 bp, synthetic construct
  source 1..27: mol_type = other DNA
ctagcattcggcttcagcgccgacgct

SEQ ID NO: 1283 - DNA, 27 bp, synthetic construct
  source 1..27: mol_type = other DNA
ctagcagagggcatgaccggcatcgct

SEQ ID NO: 1284 - DNA, 27 bp, synthetic construct
  source 1..27: mol_type = other DNA
ctagcacacgacctgcacggcggcgct

SEQ ID NO: 1285 - DNA, 27 bp, synthetic construct
  source 1..27: mol_type = other DNA
ctagcacaggccggcgacaccgccgct

SEQ ID NO: 1286 - DNA, 27 bp, synthetic construct
  source 1..27: mol_type = other DNA
ctagcaggcgaggtgaccaagcacgct

SEQ ID NO: 1287 - DNA, 27 bp, synthetic construct
  source 1..27: mol_type = other DNA
ctagcactgaacgccgccgccaccgct

SEQ ID NO: 1288 - DNA, 27 bp, synthetic construct
  source 1..27: mol_type = other DNA
ctagcagactgcatgatgatcaacgct

SEQ ID NO: 1289 - DNA, 27 bp, synthetic construct
  source 1..27: mol_type = other DNA
ctagcatacttccacagctacgccgct

SEQ ID NO: 1290 - DNA, 27 bp, synthetic construct
  source 1..27: mol_type = other DNA
ctagcaatcagccagcccaaccccgct

SEQ ID NO: 1291 - DNA, 27 bp, synthetic construct
  source 1..27: mol_type = other DNA
ctagcagtggccgtggactgcttcgct

SEQ ID NO: 1292 - DNA, 27 bp, synthetic construct
  source 1..27: mol_type = other DNA
ctagcagaccacggcaacaagcccgct

SEQ ID NO: 1293 - DNA, 27 bp, synthetic construct
  source 1..27: mol_type = other DNA
ctagcagccgagcacatcggccgggct

SEQ ID NO: 1294 - DNA, 27 bp, synthetic construct
  source 1..27: mol_type = other DNA
ctagcagtgacccccccctggtacgct

SEQ ID NO: 1295 - DNA, 27 bp, synthetic construct
  source 1..27: mol_type = other DNA
ctagcagtgcccaaggccgacgccgct

SEQ ID NO: 1296 - DNA, 27 bp, synthetic construct
  source 1..27: mol_type = other DNA
ctagcaaacatgatggccgccggcgct

SEQ ID NO: 1297 - DNA, 27 bp, synthetic construct
  source 1..27: mol_type = other DNA
ctagcaaacgtgaccctgcagagcgct

SEQ ID NO: 1298 - DNA, 27 bp, synthetic construct
  source 1..27: mol_type = other DNA
ctagcacccatccagctggcccaggct

SEQ ID NO: 1299 - DNA, 27 bp, synthetic construct
  source 1..27: mol_type = other DNA
ctagcaaaccagggcttcctgaccgct

SEQ ID NO: 1300 - DNA, 27 bp, synthetic construct
  source 1..27: mol_type = other DNA
ctagcacccctgcagacccaggaggct

SEQ ID NO: 1301 - DNA, 27 bp, synthetic construct
  source 1..27: mol_type = other DNA
ctagcagagcaggtgctggagaaggct

SEQ ID NO: 1302 - DNA, 27 bp, synthetic construct
  source 1..27: mol_type = other DNA
ctagcagtggacatcatgcggggcgct

SEQ ID NO: 1303 - DNA, 27 bp, synthetic construct
  source 1..27: mol_type = other DNA
ctagcatgcaccttcaagcccaacgct

SEQ ID NO: 1304 - DNA, 27 bp, synthetic construct
  source 1..27: mol_type = other DNA
ctagcaacctggtgcctggtgtgggct

SEQ ID NO: 1305 - DNA, 27 bp, synthetic construct
  source 1..27: mol_type = other DNA
ctagcaaagagcgccggcatcctggct

SEQ ID NO: 1306 - DNA, 27 bp, synthetic construct
  source 1..27: mol_type = other DNA
ctagcatacggccagcagaccaccgct

SEQ ID NO: 1307 - DNA, 27 bp, synthetic construct
  source 1..27: mol_type = other DNA
ctagcacacgccggcagcagcagcgct

SEQ ID NO: 1308 - DNA, 27 bp, synthetic construct
  source 1..27: mol_type = other DNA
ctagcaggcaagaccatcagcggcgct

SEQ ID NO: 1309 - DNA, 27 bp, synthetic construct
  source 1..27: mol_type = other DNA
ctagcaagcatcggcttcagcgccgct

SEQ ID NO: 1310 - DNA, 27 bp, synthetic construct
  source 1..27: mol_type = other DNA
ctagcattcccctgcatcaaggaggct

SEQ ID NO: 1311 - DNA, 27 bp, synthetic construct
  source 1..27: mol_type = other DNA
ctagcaatgctgggcggcaccagcgct

SEQ ID NO: 1312 - DNA, 27 bp, synthetic construct
  source 1..27: mol_type = other DNA
ctagcaggcggcagcaagctggaggct

SEQ ID NO: 1313 - DNA, 27 bp, synthetic construct
  source 1..27: mol_type = other DNA
ctagcagccgaccccaccttcaaggct

SEQ ID NO: 1314 - DNA, 27 bp, synthetic construct
  source 1..27: mol_type = other DNA
ctagcagagaccaccctgacccgggct

SEQ ID NO: 1315 - DNA, 27 bp, synthetic construct
  source 1..27: mol_type = other DNA
ctagcacacgactggggcgcccccgct

SEQ ID NO: 1316 - DNA, 27 bp, synthetic construct
  source 1..27: mol_type = other DNA
ctagcaatggaccgggagatcaaggct

SEQ ID NO: 1317 - DNA, 27 bp, synthetic construct
  source 1..27: mol_type = other DNA
ctagcagtgttccaggagaccggcgct

SEQ ID NO: 1318 - DNA, 27 bp, synthetic construct
  source 1..27: mol_type = other DNA
ctagcacaggtggaggtgagcaaggct

SEQ ID NO: 1319 - DNA, 27 bp, synthetic construct
  source 1..27: mol_type = other DNA
ctagcacccggcaacgacctgtgggct

SEQ ID NO: 1320 - DNA, 27 bp, synthetic construct
  source 1..27: mol_type = other DNA
ctagcaatccccgtggaggccaacgct

SEQ ID NO: 1321 - DNA, 27 bp, synthetic construct
  source 1..27: mol_type = other DNA
ctagcaaaggacggcggcaagatcgct

SEQ ID NO: 1322 - DNA, 27 bp, synthetic construct
  source 1..27: mol_type = other DNA
ctagcagagcggaaccacggctacgct

SEQ ID NO: 1323 - DNA, 27 bp, synthetic construct
  source 1..27: mol_type = other DNA
ctagcaatgctggcctgcaagggcgct

SEQ ID NO: 1324 - DNA, 27 bp, synthetic construct
  source 1..27: mol_type = other DNA
ctagcacaccacaaggagagcatcgct

SEQ ID NO: 1325 - DNA, 27 bp, synthetic construct
  source 1..27: mol_type = other DNA
ctagcataccaccagtgggacgacgct

SEQ ID NO: 1326 - DNA, 27 bp, synthetic construct
  source 1..27: mol_type = other DNA
ctagcaaaggtggccagcatgaacgct

SEQ ID NO: 1327 - DNA, 27 bp, synthetic construct
  source 1..27: mol_type = other DNA
ctagcaaacgagggcaccatccgggct

SEQ ID NO: 1328 - DNA, 27 bp, synthetic construct
  source 1..27: mol_type = other DNA
ctagcaggcaagatcgaggagaacgct

SEQ ID NO: 1329 - DNA, 27 bp, synthetic construct
  source 1..27: mol_type = other DNA
ctagcacccgtgaagcacacctgggct

SEQ ID NO: 1330 - DNA, 27 bp, synthetic construct
  source 1..27: mol_type = other DNA
ctagcagacgagggccgggagcacgct

SEQ ID NO: 1331 - DNA, 27 bp, synthetic construct
  source 1..27: mol_type = other DNA
ctagcactgaacaacgaccagagcgct

SEQ ID NO: 1332 - DNA, 27 bp, synthetic construct
  source 1..27: mol_type = other DNA
ctagcagacgtggtgagcgtgagcgct

SEQ ID NO: 1333 - DNA, 27 bp, synthetic construct
  source 1..27: mol_type = other DNA
ctagcacccagcaagatgggcctggct

SEQ ID NO: 1334 - DNA, 27 bp, synthetic construct
  source 1..27: mol_type = other DNA
ctagcaagcgcctgcatgcgggccgct

SEQ ID NO: 1335 - DNA, 27 bp, synthetic construct
  source 1..27: mol_type = other DNA
ctagcaggcgacatcgtgcggaacgct

SEQ ID NO: 1336 - DNA, 27 bp, synthetic construct
  source 1..27: mol_type = other DNA
ctagcagacacctacaagccctacgct

SEQ ID NO: 1337 - DNA, 27 bp, synthetic construct
  source 1..27: mol_type = other DNA
ctagcattccccgacaagagcatcgct

SEQ ID NO: 1338 - DNA, 27 bp, synthetic construct
  source 1..27: mol_type = other DNA
ctagcaaacgccgacttccccctggct

SEQ ID NO: 1339 - DNA, 27 bp, synthetic construct
  source 1..27: mol_type = other DNA
ctagcaaaggagggctaccgggacgct

SEQ ID NO: 1340 - DNA, 27 bp, synthetic construct
  source 1..27: mol_type = other DNA
ctagcagaccccatgcccacccacgct

SEQ ID NO: 1341 - DNA, 27 bp, synthetic construct
  source 1..27: mol_type = other DNA
ctagcacagaaccagaagcagatcgct

SEQ ID NO: 1342 - DNA, 27 bp, synthetic construct
  source 1..27: mol_type = other DNA
ctagcaagcgagaacctgaaccgggct

SEQ ID NO: 1343 - DNA, 27 bp, synthetic construct
  source 1..27: mol_type = other DNA
ctagcattctgcaccccccggtacgct

SEQ ID NO: 1344 - DNA, 27 bp, synthetic construct
  source 1..27: mol_type = other DNA
ctagcaaacctgaagaacttcagcgct

SEQ ID NO: 1345 - DNA, 27 bp, synthetic construct
  source 1..27: mol_type = other DNA
ctagcaaacgccatggagaagcacgct

SEQ ID NO: 1346 - DNA, 27 bp, synthetic construct
  source 1..27: mol_type = other DNA
ctagcaatgcacgagagctacaacgct

SEQ ID NO: 1347 - DNA, 27 bp, synthetic construct
  source 1..27: mol_type = other DNA
ctagcaatgaagtacgtgttcgacgct

SEQ ID NO: 1348 - DNA, 27 bp, synthetic construct
  source 1..27: mol_type = other DNA
ctagcaaagggccaggcccagaacgct

SEQ ID NO: 1349 - DNA, 27 bp, synthetic construct
  source 1..27: mol_type = other DNA
ctagcattccggaccatggagtacgct

SEQ ID NO: 1350 - DNA, 27 bp, synthetic construct
  source 1..27: mol_type = other DNA
ctagcaaagaaggtggtggacggcgct

SEQ ID NO: 1351 - DNA, 27 bp, synthetic construct
  source 1..27: mol_type = other DNA
ctagcaaagggcatgaaggagggcgct

SEQ ID NO: 1352 - DNA, 27 bp, synthetic construct
  source 1..27: mol_type = other DNA
ctagcagacgaccaggccgtgaacgct

SEQ ID NO: 1353 - DNA, 27 bp, synthetic construct
  source 1..27: mol_type = other DNA
ctagcaaacacctggtgcaagggcgct

SEQ ID NO: 1354 - DNA, 27 bp, synthetic construct
  source 1..27: mol_type = other DNA
ctagcaaaccagaccacccgggaggct

SEQ ID NO: 1355 - DNA, 27 bp, synthetic construct
  source 1..27: mol_type = other DNA
ctagcagacggcatccagaagaacgct

SEQ ID NO: 1356 - DNA, 27 bp, synthetic construct
  source 1..27: mol_type = other DNA
ctagcacaccagggcgccatcatcgct

SEQ ID NO: 1357 - DNA, 27 bp, synthetic construct
  source 1..27: mol_type = other DNA
ctagcagacaactgctggtgctgcgct

SEQ ID NO: 1358 - DNA, 27 bp, synthetic construct
  source 1..27: mol_type = other DNA
ctagcagacgtgggctgcgagaacgct

SEQ ID NO: 1359 - DNA, 27 bp, synthetic construct
  source 1..27: mol_type = other DNA
ctagcaggcagccgggtgaacttcgct

SEQ ID NO: 1360 - DNA, 27 bp, synthetic construct
  source 1..27: mol_type = other DNA
ctagcaaccaagagcaccggcagcgct

SEQ ID NO: 1361 - DNA, 27 bp, synthetic construct
  source 1..27: mol_type = other DNA
ctagcagcccaccagatggccagcgct

SEQ ID NO: 1362 - DNA, 27 bp, synthetic construct
  source 1..27: mol_type = other DNA
ctagcacgggaggaccaccggcaggct

SEQ ID NO: 1363 - DNA, 27 bp, synthetic construct
  source 1..27: mol_type = other DNA
ctagcatacctgcccctgaagtacgct

SEQ ID NO: 1364 - DNA, 27 bp, synthetic construct
  source 1..27: mol_type = other DNA
ctagcactggagaccacccagcgggct

SEQ ID NO: 1365 - DNA, 27 bp, synthetic construct
  source 1..27: mol_type = other DNA
ctagcagagggcctgagccagttcgct

SEQ ID NO: 1366 - DNA, 27 bp, synthetic construct
  source 1..27: mol_type = other DNA
ctagcagactggcggaccacccccgct

SEQ ID NO: 1367 - DNA, 27 bp, synthetic construct
  source 1..27: mol_type = other DNA
ctagcagagaccgtgaagtacatggct

SEQ ID NO: 1368 - DNA, 27 bp, synthetic construct
  source 1..27: mol_type = other DNA
ctagcagccgtgaaggccgtggtggct

SEQ ID NO: 1369 - DNA, 27 bp, synthetic construct
  source 1..27: mol_type = other DNA
ctagcaaagggccagagccagggcgct

SEQ ID NO: 1370 - DNA, 27 bp, synthetic construct
  source 1..27: mol_type = other DNA
ctagcagtggagcccggcccccccgct

SEQ ID NO: 1371 - DNA, 27 bp, synthetic construct
  source 1..27: mol_type = other DNA
ctagcagccgagcacaagcagaccgct

SEQ ID NO: 1372 - DNA, 27 bp, synthetic construct
  source 1..27: mol_type = other DNA
ctagcacactaccccagcgcccccgct

SEQ ID NO: 1373 - DNA, 27 bp, synthetic construct
  source 1..27: mol_type = other DNA
ctagcaacccgggccgacatcttcgct

SEQ ID NO: 1374 - DNA, 27 bp, synthetic construct
  source 1..27: mol_type = other DNA
ctagcatacctgcgggccctgaaggct

SEQ ID NO: 1375 - DNA, 27 bp, synthetic construct
  source 1..27: mol_type = other DNA
ctagcacagaaccagtggaccgacgct

SEQ ID NO: 1376 - DNA, 27 bp, synthetic construct
  source 1..27: mol_type = other DNA
ctagcaggcggcgcctgggactgggct

SEQ ID NO: 1377 - DNA, 27 bp, synthetic construct
  source 1..27: mol_type = other DNA
ctagcagacgagaacctgcaggccgct

SEQ ID NO: 1378 - DNA, 27 bp, synthetic construct
  source 1..27: mol_type = other DNA
ctagcaaaccggctgagcaacgtggct

SEQ ID NO: 1379 - DNA, 27 bp, synthetic construct
  source 1..27: mol_type = other DNA
ctagcagagccccccgacccccccgct

SEQ ID NO: 1380 - DNA, 27 bp, synthetic construct
  source 1..27: mol_type = other DNA
ctagcacaggaggccaagctgaccgct

SEQ ID NO: 1381 - DNA, 27 bp, synthetic construct
  source 1..27: mol_type = other DNA
ctagcacacacccccgacaccttcgct

SEQ ID NO: 1382 - DNA, 27 bp, synthetic construct
  source 1..27: mol_type = other DNA
ctagcaggcgagagcagctacctggct

SEQ ID NO: 1383 - DNA, 27 bp, synthetic construct
  source 1..27: mol_type = other DNA
ctagcagacctgaccctgcgggccgct

SEQ ID NO: 1384 - DNA, 27 bp, synthetic construct
  source 1..27: mol_type = other DNA
ctagcaaagcgggacaagcccaccgct

SEQ ID NO: 1385 - DNA, 27 bp, synthetic construct
  source 1..27: mol_type = other DNA
ctagcaaaccggtgggccatcgacgct

SEQ ID NO: 1386 - DNA, 27 bp, synthetic construct
  source 1..27: mol_type = other DNA
ctagcatgccggagcgactgcgtggct

SEQ ID NO: 1387 - DNA, 27 bp, synthetic construct
  source 1..27: mol_type = other DNA
ctagcaaagcccaccggcaaggacgct

SEQ ID NO: 1388 - DNA, 27 bp, synthetic construct
  source 1..27: mol_type = other DNA
ctagcaggccacaagcacgacgaggct

SEQ ID NO: 1389 - DNA, 27 bp, synthetic construct
  source 1..27: mol_type = other DNA
ctagcagcccaggacgtgagctgggct

SEQ ID NO: 1390 - DNA, 27 bp, synthetic construct
  source 1..27: mol_type = other DNA
ctagcagacgtgggctgcgagaacgct

SEQ ID NO: 1391 - DNA, 27 bp, synthetic construct
  source 1..27: mol_type = other DNA
ctagcaaagggccccgccagcatcgct

SEQ ID NO: 1392 - DNA, 27 bp, synthetic construct
  source 1..27: mol_type = other DNA
ctagcaggcccccagcggttccaggct

SEQ ID NO: 1393 - DNA, 27 bp, synthetic construct
  source 1..27: mol_type = other DNA
ctagcagccaccatctgcaccgaggct

SEQ ID NO: 1394 - DNA, 27 bp, synthetic construct
  source 1..27: mol_type = other DNA
ctagcaatgaccaacaccttcctggct

SEQ ID NO: 1395 - DNA, 27 bp, synthetic construct
  source 1..27: mol_type = other DNA
ctagcaaagggcatgaaggagggcgct

SEQ ID NO: 1396 - DNA, 27 bp, synthetic construct
  source 1..27: mol_type = other DNA
ctagcaaagggcgtgaccaccgccgct

SEQ ID NO: 1397 - DNA, 27 bp, synthetic construct
  source 1..27: mol_type = other DNA
ctagcacggttccggggcatgtgcgct

SEQ ID NO: 1398 - DNA, 24 bp, synthetic construct
  source 1..24: mol_type = other DNA
accagccacgtgagcaccagcagc

SEQ ID NO: 1399 - DNA, 24 bp, synthetic construct
  source 1..24: mol_type = other DNA
agcggcgtgctgttcaccgagggc

SEQ ID NO: 1400 - DNA, 24 bp, synthetic construct
  source 1..24: mol_type = other DNA
accagcggcatgggcgccatcggc

SEQ ID NO: 1401 - DNA, 24 bp, synthetic construct
  source 1..24: mol_type = other DNA
accggcgacagcgagcagcagacc

SEQ ID NO: 1402 - DNA, 24 bp, synthetic construct
  source 1..24: mol_type = other DNA
agcggccccggcaccagcggcacc

SEQ ID NO: 1403 - DNA, 24 bp, synthetic construct
  source 1..24: mol_type = other DNA
agcggcagcgtgggctacgtgggc

SEQ ID NO: 1404 - DNA, 24 bp, synthetic construct
  source 1..24: mol_type = other DNA
accggcgagggccccaccaagggc

SEQ ID NO: 1405 - DNA, 24 bp, synthetic construct
  source 1..24: mol_type = other DNA
accggcgacaagtggccccagggc

SEQ ID NO: 1406 - DNA, 24 bp, synthetic construct
  source 1..24: mol_type = other DNA
agcggcgagatgaccaagcccggc

SEQ ID NO: 1407 - DNA, 24 bp, synthetic construct
  source 1..24: mol_type = other DNA
accaccgagaaccacaagcccggc

SEQ ID NO: 1408 - DNA, 24 bp, synthetic construct
  source 1..24: mol_type = other DNA
agcggccgggagatccacttcggc

SEQ ID NO: 1409 - DNA, 24 bp, synthetic construct
  source 1..24: mol_type = other DNA
agcagcgagaacaacaagggcggc

SEQ ID NO: 1410 - DNA, 24 bp, synthetic construct
  source 1..24: mol_type = other DNA
accagccaggagaagcagaacagc

SEQ ID NO: 1411 - DNA, 24 bp, synthetic construct
  source 1..24: mol_type = other DNA
ggcaccatgttcaacaacagcacc

SEQ ID NO: 1412 - DNA, 24 bp, synthetic construct
  source 1..24: mol_type = other DNA
accaccggcatggagcggcccacc

SEQ ID NO: 1413 - DNA, 24 bp, synthetic construct
  source 1..24: mol_type = other DNA
agcggccccaaggagaccggcggc

SEQ ID NO: 1414 - DNA, 24 bp, synthetic construct
  source 1..24: mol_type = other DNA
agcggcatcgacacccggctgggc

SEQ ID NO: 1415 - DNA, 24 bp, synthetic construct
  source 1..24: mol_type = other DNA
agcaccgtgcccctgaacatgggc

SEQ ID NO: 1416 - DNA, 24 bp, synthetic construct
  source 1..24: mol_type = other DNA
accggcatcgccaccagctacagc

SEQ ID NO: 1417 - DNA, 24 bp, synthetic construct
  source 1..24: mol_type = other DNA
accggcgacgagcggaagcccggc

SEQ ID NO: 1418 - DNA, 24 bp, synthetic construct
  source 1..24: mol_type = other DNA
accggccccggcacccacaacggc

SEQ ID NO: 1419 - DNA, 18 bp, synthetic construct
  source 1..18: mol_type = other DNA
agcaccaccaagcccatg

SEQ ID NO: 1420 - DNA, 18 bp, synthetic construct
  source 1..18: mol_type = other DNA
tgcaaggagatcacccgg

SEQ ID NO: 1421 - DNA, 18 bp, synthetic construct
  source 1..18: mol_type = other DNA
agcaagatgcggcccgcc

SEQ ID NO: 1422 - DNA, 18 bp, synthetic construct
  source 1..18: mol_type = other DNA
ccccccaaccagtacatc

SEQ ID NO: 1423 - DNA, 18 bp, synthetic construct
  source 1..18: mol_type = other DNA
cccgacgtgagcctgctg

SEQ ID NO: 1424 - DNA, 18 bp, synthetic construct
  source 1..18: mol_type = other DNA
cacagcaaggacggcgcc

SEQ ID NO: 1425 - DNA, 18 bp, synthetic construct
  source 1..18: mol_type = other DNA
aagttccggcacaccgag

SEQ ID NO: 1426 - DNA, 18 bp, synthetic construct
  source 1..18: mol_type = other DNA
ctgtggatgaccaccgtg

SEQ ID NO: 1427 - DNA, 18 bp, synthetic construct
  source 1..18: mol_type = other DNA
cggcccggccgggtgagc

SEQ ID NO: 1428 - DNA, 18 bp, synthetic construct
  source 1..18: mol_type = other DNA
aacatcaagaaggccgcc

SEQ ID NO: 1429 - DNA, 18 bp, synthetic construct
  source 1..18: mol_type = other DNA
cggctgggccggctgagc

SEQ ID NO: 1430 - DNA, 18 bp, synthetic construct
  source 1..18: mol_type = other DNA
ttcaacaaggtgctgcac

SEQ ID NO: 1431 - DNA, 18 bp, synthetic construct
  source 1..18: mol_type = other DNA
cggaccggccggaacacc

SEQ ID NO: 1432 - DNA, 18 bp, synthetic construct
  source 1..18: mol_type = other DNA
cgggccctgaagatcagc

SEQ ID NO: 1433 - DNA, 18 bp, synthetic construct
  source 1..18: mol_type = other DNA
cggctgggcaaggtgccc

SEQ ID NO: 1434 - DNA, 18 bp, synthetic construct
  source 1..18: mol_type = other DNA
aagttcaccaaggccgcc

SEQ ID NO: 1435 - DNA, 18 bp, synthetic construct
  source 1..18: mol_type = other DNA
cacttccccgtgttcagc

SEQ ID NO: 1436 - DNA, 18 bp, synthetic construct
  source 1..18: mol_type = other DNA
aacagcaagaagctgggc

SEQ ID NO: 1437 - DNA, 18 bp, synthetic construct
  source 1..18: mol_type = other DNA
aaggccatgcggaccggc

SEQ ID NO: 1438 - DNA, 27 bp, synthetic construct
  source 1..27: mol_type = other DNA
ctagcagagttccgggtgggccaggct

SEQ ID NO: 1439 - DNA, 27 bp, synthetic construct
  source 1..27: mol_type = other DNA
ctagcaggcatccagcagcacgtggct

SEQ ID NO: 1440 - DNA, 27 bp, synthetic construct
  source 1..27: mol_type = other DNA
ctagcacaggtgaccgagatgcgggct

SEQ ID NO: 1441 - DNA, 27 bp, synthetic construct
  source 1..27: mol_type = other DNA
ctagcattcaacggcagcaccagcgct

SEQ ID NO: 1442 - DNA, 27 bp, synthetic construct
  source 1..27: mol_type = other DNA
ctagcaaagggcttcaagaccgaggct

SEQ ID NO: 1443 - DNA, 27 bp, synthetic construct
  source 1..27: mol_type = other DNA
ctagcagccggccaggcccagagcgct

SEQ ID NO: 1444 - DNA, 27 bp, synthetic construct
  source 1..27: mol_type = other DNA
ctagcattcctgcggggccccgaggct

SEQ ID NO: 1445 - DNA, 27 bp, synthetic construct
  source 1..27: mol_type = other DNA
ctagcacaggtgcaggtggagggcgct

SEQ ID NO: 1446 - DNA, 27 bp, synthetic construct
  source 1..27: mol_type = other DNA
ctagcaggcagcatggccaagctggct

SEQ ID NO: 1447 - DNA, 27 bp, synthetic construct
  source 1..27: mol_type = other DNA
ctagcaggccacgccgcctgcttcgct

SEQ ID NO: 1448 - DNA, 27 bp, synthetic construct
  source 1..27: mol_type = other DNA
ctagcagtgaaccgggtggacatggct

SEQ ID NO: 1449 - DNA, 27 bp, synthetic construct
  source 1..27: mol_type = other DNA
ctagcaggcttccacgccatcgaggct

SEQ ID NO: 1450 - DNA, 27 bp, synthetic construct
  source 1..27: mol_type = other DNA
ctagcatacttccacagctacgccgct

SEQ ID NO: 1451 - DNA, 27 bp, synthetic construct
  source 1..27: mol_type = other DNA
ctagcagaccacggcaacaagcccgct

SEQ ID NO: 1452 - DNA, 27 bp, synthetic construct
  source 1..27: mol_type = other DNA
ctagcacccatccagctggcccaggct

SEQ ID NO: 1453 - DNA, 27 bp, synthetic construct
  source 1..27: mol_type = other DNA
ctagcacccctgcagacccaggaggct

SEQ ID NO: 1454 - DNA, 27 bp, synthetic construct
  source 1..27: mol_type = other DNA
ctagcagagcaggtgctggagaaggct

SEQ ID NO: 1455 - DNA, 27 bp, synthetic construct
  source 1..27: mol_type = other DNA
ctagcattcccctgcatcaaggaggct

SEQ ID NO: 1456 - DNA, 27 bp, synthetic construct
  source 1..27: mol_type = other DNA
ctagcacaggtggaggtgagcaaggct

SEQ ID NO: 1457 - DNA, 27 bp, synthetic construct
  source 1..27: mol_type = other DNA
ctagcaaaggacggcggcaagatcgct

SEQ ID NO: 1458 - DNA, 27 bp, synthetic construct
  source 1..27: mol_type = other DNA
ctagcaaaggtggccagcatgaacgct

SEQ ID NO: 1459 - DNA, 27 bp, synthetic construct
  source 1..27: mol_type = other DNA
ctagcagacgagggccgggagcacgct

SEQ ID NO: 1460 - DNA, 27 bp, synthetic construct
  source 1..27: mol_type = other DNA
ctagcaagcgcctgcatgcgggccgct

SEQ ID NO: 1461 - DNA, 27 bp, synthetic construct
  source 1..27: mol_type = other DNA
ctagcaggcgacatcgtgcggaacgct

SEQ ID NO: 1462 - DNA, 27 bp, synthetic construct
  source 1..27: mol_type = other DNA
ctagcagaccccatgcccacccacgct

SEQ ID NO: 1463 - DNA, 27 bp, synthetic construct
  source 1..27: mol_type = other DNA
ctagcattctgcaccccccggtacgct

SEQ ID NO: 1464 - DNA, 27 bp, synthetic construct
  source 1..27: mol_type = other DNA
ctagcaaacgccatggagaagcacgct

SEQ ID NO: 1465 - DNA, 27 bp, synthetic construct
  source 1..27: mol_type = other DNA
ctagcaatgcacgagagctacaacgct

SEQ ID NO: 1466 - DNA, 27 bp, synthetic construct
  source 1..27: mol_type = other DNA
ctagcaaagggccaggcccagaacgct

SEQ ID NO: 1467 - DNA, 27 bp, synthetic construct
  source 1..27: mol_type = other DNA
ctagcagacgaccaggccgtgaacgct

SEQ ID NO: 1468 - DNA, 27 bp, synthetic construct
  source 1..27: mol_type = other DNA
ctagcagacggcatccagaagaacgct

SEQ ID NO: 1469 - DNA, 27 bp, synthetic construct
  source 1..27: mol_type = other DNA
ctagcagcccaccagatggccagcgct

SEQ ID NO: 1470 - DNA, 27 bp, synthetic construct
  source 1..27: mol_type = other DNA
ctagcagagaccgtgaagtacatggct

SEQ ID NO: 1471 - DNA, 27 bp, synthetic construct
  source 1..27: mol_type = other DNA
ctagcaaagggccagagccagggcgct

SEQ ID NO: 1472 - DNA, 27 bp, synthetic construct
  source 1..27: mol_type = other DNA
ctagcagtggagcccggcccccccgct

SEQ ID NO: 1473 - DNA, 27 bp, synthetic construct
  source 1..27: mol_type = other DNA
ctagcagccgagcacaagcagaccgct

SEQ ID NO: 1474 - DNA, 27 bp, synthetic construct
  source 1..27: mol_type = other DNA
ctagcagagccccccgacccccccgct

SEQ ID NO: 1475 - DNA, 27 bp, synthetic construct
  source 1..27: mol_type = other DNA
ctagcacacacccccgacaccttcgct

SEQ ID NO: 1476 - DNA, 27 bp, synthetic construct
  source 1..27: mol_type = other DNA
ctagcaaagggccccgccagcatcgct

SEQ ID NO: 1477 - DNA, 27 bp, synthetic construct
  source 1..27: mol_type = other DNA
ctagcaaagggcatgaaggagggcgct

SEQ ID NO: 1478 - DNA, 27 bp, synthetic construct
  source 1..27: mol_type = other DNA
ctagcaaagggcgtgaccaccgccgct

SEQ ID NO: 1479 - DNA, 18 bp, synthetic construct
  source 1..18: mol_type = other DNA
aacagcaagaagctgggc

SEQ ID NO: 1480 - DNA, 18 bp, synthetic construct
  source 1..18: mol_type = other DNA
aaggccatgcggaccggc

SEQ ID NO: 1481 - DNA, 27 bp, synthetic construct
  source 1..27: mol_type = other DNA
ctagcaaagatcaacgcccagcccgct

SEQ ID NO: 1482 - DNA, 27 bp, synthetic construct
  source 1..27: mol_type = other DNA
ctagcagaggaggagaagtacggcgct

SEQ ID NO: 1483 - DNA, 27 bp, synthetic construct
  source 1..27: mol_type = other DNA
ctagcactggaggtgggcgaccacgct

SEQ ID NO: 1484 - DNA, 27 bp, synthetic construct
  source 1..27: mol_type = other DNA
ctagcaatcggcagcgacaccagcgct

SEQ ID NO: 1485 - DNA, 27 bp, synthetic construct
  source 1..27: mol_type = other DNA
ctagcagccgtgcacctgatgggcgct

SEQ ID NO: 1486 - DNA, 27 bp, synthetic construct
  source 1..27: mol_type = other DNA
ctagcagtgcggaacgagatcaacgct

SEQ ID NO: 1487 - DNA, 27 bp, synthetic construct
  source 1..27: mol_type = other DNA
ctagcacaggtgaagcagggccccgct

SEQ ID NO: 1488 - DNA, 27 bp, synthetic construct
  source 1..27: mol_type = other DNA
ctagcaaacaagaacaccgccatcgct

SEQ ID NO: 1489 - DNA, 27 bp, synthetic construct
  source 1..27: mol_type = other DNA
ctagcagagcacaagaacatgcacgct

SEQ ID NO: 1490 - DNA, 27 bp, synthetic construct
  source 1..27: mol_type = other DNA
ctagcagaggtgacctacaccggcgct

SEQ ID NO: 1491 - DNA, 27 bp, synthetic construct
  source 1..27: mol_type = other DNA
ctagcaagcgccgaccaccagcccgct

SEQ ID NO: 1492 - DNA, 27 bp, synthetic construct
  source 1..27: mol_type = other DNA
ctagcagagttcgacggcgacggcgct

SEQ ID NO: 1493 - DNA, 27 bp, synthetic construct
  source 1..27: mol_type = other DNA
ctagcagacttccccagcgagaaggct

SEQ ID NO: 1494 - DNA, 27 bp, synthetic construct
  source 1..27: mol_type = other DNA
ctagcactggacatgtgggagcccgct

SEQ ID NO: 1495 - DNA, 27 bp, synthetic construct
  source 1..27: mol_type = other DNA
ctagcaaagttcgccgccaaggacgct

SEQ ID NO: 1496 - DNA, 27 bp, synthetic construct
  source 1..27: mol_type = other DNA
ctagcaaacaacgccgagcccagcgct

SEQ ID NO: 1497 - DNA, 27 bp, synthetic construct
  source 1..27: mol_type = other DNA
ctagcacacgactggggcgcccccgct

SEQ ID NO: 1498 - DNA, 27 bp, synthetic construct
  source 1..27: mol_type = other DNA
ctagcaatggaccgggagatcaaggct

SEQ ID NO: 1499 - DNA, 27 bp, synthetic construct
  source 1..27: mol_type = other DNA
ctagcacagggcaacaacaccggcgct

SEQ ID NO: 1500 - DNA, 27 bp, synthetic construct
  source 1..27: mol_type = other DNA
ctagcagacaacctgaacacccccgct

SEQ ID NO: 1501 - DNA, 27 bp, synthetic construct
  source 1..27: mol_type = other DNA
ctagcagccgccaaccacgacaacgct

SEQ ID NO: 1502 - DNA, 27 bp, synthetic construct
  source 1..27: mol_type = other DNA
ctagcagtgcccaaggccgacgccgct

SEQ ID NO: 1503 - DNA, 27 bp, synthetic construct
  source 1..27: mol_type = other DNA
ctagcagtgttccaggagaccggcgct

SEQ ID NO: 1504 - DNA, 27 bp, synthetic construct
  source 1..27: mol_type = other DNA
ctagcagccgtgaaggccgtggtggct

SEQ ID NO: 1505 - DNA, 27 bp, synthetic construct
  source 1..27: mol_type = other DNA
ctagcagacaactgctggtgctgcgct

SEQ ID NO: 1506 - DNA, 27 bp, synthetic construct
  source 1..27: mol_type = other DNA
ctagcacacgccggcagcagcagcgct

SEQ ID NO: 1507 - DNA, 27 bp, synthetic construct
  source 1..27: mol_type = other DNA
ctagcaggcatccagcagcacgtggct

SEQ ID NO: 1508 - DNA, 27 bp, synthetic construct
  source 1..27: mol_type = other DNA
ctagcacacgacctgcacggcggcgct

SEQ ID NO: 1509 - DNA, 27 bp, synthetic construct
  source 1..27: mol_type = other DNA
ctagcaatgcacgagagctacaacgct

SEQ ID NO: 1510 - DNA, 27 bp, synthetic construct
  source 1..27: mol_type = other DNA
ctagcaacccccaacgtgaacgccgct

SEQ ID NO: 1511 - DNA, 27 bp, synthetic construct
  source 1..27: mol_type = other DNA
ctagcattcaacggcagcaccagcgct

SEQ ID NO: 1512 - DNA, 27 bp, synthetic construct
  source 1..27: mol_type = other DNA
ctagcagagggcctgagccagttcgct

SEQ ID NO: 1513 - DNA, 27 bp, synthetic construct
  source 1..27: mol_type = other DNA
ctagcacaggtgaccgagatgcgggct

SEQ ID NO: 1514 - DNA, 27 bp, synthetic construct
  source 1..27: mol_type = other DNA
ctagcagcccaccagatggccagcgct

SEQ ID NO: 1515 - DNA, 27 bp, synthetic construct
  source 1..27: mol_type = other DNA
ctagcaagcgcctgcatgcgggccgct

SEQ ID NO: 1516 - DNA, 27 bp, synthetic construct
  source 1..27: mol_type = other DNA
ctagcagacggcatccagaagaacgct

SEQ ID NO: 1517 - DNA, 27 bp, synthetic construct
  source 1..27: mol_type = other DNA
ctagcacacatccaggagcccaaggct

SEQ ID NO: 1518 - DNA, 27 bp, synthetic construct
  source 1..27: mol_type = other DNA
ctagcagccggccaggcccagagcgct

SEQ ID NO: 1519 - DNA, 27 bp, synthetic construct
  source 1..27: mol_type = other DNA
ctagcagaccacggcaacaagcccgct

SEQ ID NO: 1520 - DNA, 27 bp, synthetic construct
  source 1..27: mol_type = other DNA
ctagcattcctgcggggccccgaggct

SEQ ID NO: 1521 - DNA, 27 bp, synthetic construct
  source 1..27: mol_type = other DNA
ctagcagagaccgtgaagtacatggct

SEQ ID NO: 1522 - DNA, 27 bp, synthetic construct
  source 1..27: mol_type = other DNA
ctagcagacgagggccgggagcacgct

SEQ ID NO: 1523 - DNA, 27 bp, synthetic construct
  source 1..27: mol_type = other DNA
ctagcaggcgacatcgtgcggaacgct

SEQ ID NO: 1524 - DNA, 27 bp, synthetic construct
  source 1..27: mol_type = other DNA
ctagcaggcagcatggccaagctggct

SEQ ID NO: 1525 - DNA, 27 bp, synthetic construct
  source 1..27: mol_type = other DNA
ctagcaaagggcatgaaggagggcgct

SEQ ID NO: 1526 - DNA, 27 bp, synthetic construct
  source 1..27: mol_type = other DNA
ctagcagagccccccgacccccccgct

SEQ ID NO: 1527 - DNA, 27 bp, synthetic construct
  source 1..27: mol_type = other DNA
ctagcaacctggtgcctggtgtgggct

SEQ ID NO: 1528 - DNA, 27 bp, synthetic construct
  source 1..27: mol_type = other DNA
ctagcattcccctgcatcaaggaggct

SEQ ID NO: 1529 - DNA, 27 bp, synthetic construct
  source 1..27: mol_type = other DNA
ctagcaaagggcttcaagaccgaggct

SEQ ID NO: 1530 - DNA, 27 bp, synthetic construct
  source 1..27: mol_type = other DNA
ctagcaaagggccagagccagggcgct

SEQ ID NO: 1531 - DNA, 27 bp, synthetic construct
  source 1..27: mol_type = other DNA
ctagcagagcaggtgctggagaaggct

SEQ ID NO: 1532 - DNA, 27 bp, synthetic construct
  source 1..27: mol_type = other DNA
ctagcaaagggccccgccagcatcgct

SEQ ID NO: 1533 - DNA, 27 bp, synthetic construct
  source 1..27: mol_type = other DNA
ctagcagagttccgggtgggccaggct

SEQ ID NO: 1534 - DNA, 27 bp, synthetic construct
  source 1..27: mol_type = other DNA
ctagcagtggagcccggcccccccgct

SEQ ID NO: 1535 - DNA, 27 bp, synthetic construct
  source 1..27: mol_type = other DNA
ctagcagtgaaccgggtggacatggct

SEQ ID NO: 1536 - DNA, 27 bp, synthetic construct
  source 1..27: mol_type = other DNA
ctagcatacttccacagctacgccgct

SEQ ID NO: 1537 - DNA, 27 bp, synthetic construct
  source 1..27: mol_type = other DNA
ctagcacacacccccgacaccttcgct

SEQ ID NO: 1538 - DNA, 27 bp, synthetic construct
  source 1..27: mol_type = other DNA
ctagcattctgcaccccccggtacgct

SEQ ID NO: 1539 - DNA, 27 bp, synthetic construct
  source 1..27: mol_type = other DNA
ctagcagccgagcacaagcagaccgct

SEQ ID NO: 1540 - DNA, 27 bp, synthetic construct
  source 1..27: mol_type = other DNA
ctagcacccatccagctggcccaggct

SEQ ID NO: 1541 - DNA, 27 bp, synthetic construct
  source 1..27: mol_type = other DNA
ctagcacaggtggaggtgagcaaggct

SEQ ID NO: 1542 - DNA, 27 bp, synthetic construct
  source 1..27: mol_type = other DNA
ctagcacccctgcagacccaggaggct

SEQ ID NO: 1543 - DNA, 27 bp, synthetic construct
  source 1..27: mol_type = other DNA
ctagcacgggccatcaccaacgaggct

SEQ ID NO: 1544 - DNA, 27 bp, synthetic construct
  source 1..27: mol_type = other DNA
ctagcaggccacgccgcctgcttcgct

SEQ ID NO: 1545 - DNA, 27 bp, synthetic construct
  source 1..27: mol_type = other DNA
ctagcaggcttccacgccatcgaggct

SEQ ID NO: 1546 - DNA, 27 bp, synthetic construct
  source 1..27: mol_type = other DNA
ctagcacaggtgcaggtggagggcgct

SEQ ID NO: 1547 - DNA, 27 bp, synthetic construct
  source 1..27: mol_type = other DNA
ctagcaaacgccatggagaagcacgct

SEQ ID NO: 1548 - DNA, 27 bp, synthetic construct
  source 1..27: mol_type = other DNA
ctagcagaccccatgcccacccacgct

SEQ ID NO: 1549 - DNA, 27 bp, synthetic construct
  source 1..27: mol_type = other DNA
ctagcaaaggtggccagcatgaacgct

SEQ ID NO: 1550 - DNA, 27 bp, synthetic construct
  source 1..27: mol_type = other DNA
ctagcaaagggccaggcccagaacgct

SEQ ID NO: 1551 - DNA, 27 bp, synthetic construct
  source 1..27: mol_type = other DNA
ctagcaaaggacggcggcaagatcgct

SEQ ID NO: 1552 - DNA, 27 bp, synthetic construct
  source 1..27: mol_type = other DNA
ctagcagacgaccaggccgtgaacgct

SEQ ID NO: 1553 - DNA, 27 bp, synthetic construct
  source 1..27: mol_type = other DNA
ctagcaaagggcgtgaccaccgccgct

SEQ ID NO: 1554 - DNA, 24 bp, synthetic construct
  source 1..24: mol_type = other DNA
agcggccccaaggagaccggcggc

SEQ ID NO: 1555 - DNA, 24 bp, synthetic construct
  source 1..24: mol_type = other DNA
accggccccggcacccacaacggc

SEQ ID NO: 1556 - DNA, 18 bp, synthetic construct
  source 1..18: mol_type = other DNA
aacagcaagaagctgggc

SEQ ID NO: 1557 - DNA, 18 bp, synthetic construct
  source 1..18: mol_type = other DNA
aaggccatgcggaccggc

SEQ ID NO: 1558 - DNA, 27 bp, synthetic construct
  source 1..27: mol_type = other DNA
ctagcagagctggccctgatcaaggct

SEQ ID NO: 1559 - DNA, 27 bp, synthetic construct
  source 1..27: mol_type = other DNA
ctagcagacctgagcgaccaccacgct

SEQ ID NO: 1560 - DNA, 27 bp, synthetic construct
  source 1..27: mol_type = other DNA
ctagcagaccccctgtacgccgtggct

SEQ ID NO: 1561 - DNA, 27 bp, synthetic construct
  source 1..27: mol_type = other DNA
ctagcacccatgcggggcgtgtacgct

SEQ ID NO: 1562 - DNA, 27 bp, synthetic construct
  source 1..27: mol_type = other DNA
ctagcaatcacccagagcgacatcgct

SEQ ID NO: 1563 - DNA, 27 bp, synthetic construct
  source 1..27: mol_type = other DNA
ctagcagacgacatgatcttcgtggct

SEQ ID NO: 1564 - DNA, 27 bp, synthetic construct
  source 1..27: mol_type = other DNA
ctagcagagttccgggtgggccaggct

SEQ ID NO: 1565 - DNA, 27 bp, synthetic construct
  source 1..27: mol_type = other DNA
ctagcaaaggccctgggcatggaggct

SEQ ID NO: 1566 - DNA, 27 bp, synthetic construct
  source 1..27: mol_type = other DNA
ctagcatgccccgtggccgagtgggct

SEQ ID NO: 1567 - DNA, 27 bp, synthetic construct
  source 1..27: mol_type = other DNA
ctagcaaacgaggcccagggcaaggct

SEQ ID NO: 1568 - DNA, 27 bp, synthetic construct
  source 1..27: mol_type = other DNA
ctagcacaggtgaccgagatgcgggct

SEQ ID NO: 1569 - DNA, 27 bp, synthetic construct
  source 1..27: mol_type = other DNA
ctagcaatcggcgagcggaccaccgct

SEQ ID NO: 1570 - DNA, 27 bp, synthetic construct
  source 1..27: mol_type = other DNA
ctagcaaacctgaaggagaacgaggct

SEQ ID NO: 1571 - DNA, 27 bp, synthetic construct
  source 1..27: mol_type = other DNA
ctagcattcaacggcagcaccagcgct

SEQ ID NO: 1572 - DNA, 27 bp, synthetic construct
  source 1..27: mol_type = other DNA
ctagcacaggagcagaacgccgccgct

SEQ ID NO: 1573 - DNA, 27 bp, synthetic construct
  source 1..27: mol_type = other DNA
ctagcacccaccaccatcggcggcgct

SEQ ID NO: 1574 - DNA, 27 bp, synthetic construct
  source 1..27: mol_type = other DNA
ctagcacccagcggcgaccggcacgct

SEQ ID NO: 1575 - DNA, 27 bp, synthetic construct
  source 1..27: mol_type = other DNA
ctagcaaaggaccaccacgtgatcgct

SEQ ID NO: 1576 - DNA, 27 bp, synthetic construct
  source 1..27: mol_type = other DNA
ctagcacagaagaagctgctggaggct

SEQ ID NO: 1577 - DNA, 27 bp, synthetic construct
  source 1..27: mol_type = other DNA
ctagcattcctgcggggccccgaggct

SEQ ID NO: 1578 - DNA, 27 bp, synthetic construct
  source 1..27: mol_type = other DNA
ctagcacggagcagcaccctgaacgct

SEQ ID NO: 1579 - DNA, 27 bp, synthetic construct
  source 1..27: mol_type = other DNA
ctagcacacatccaggagcccaaggct

SEQ ID NO: 1580 - DNA, 27 bp, synthetic construct
  source 1..27: mol_type = other DNA
ctagcacaggtgcaggtggagggcgct

SEQ ID NO: 1581 - DNA, 27 bp, synthetic construct
  source 1..27: mol_type = other DNA
ctagcacccaacacccccaagatcgct

SEQ ID NO: 1582 - DNA, 27 bp, synthetic construct
  source 1..27: mol_type = other DNA
ctagcagtgaaccgggtggacatggct

SEQ ID NO: 1583 - DNA, 27 bp, synthetic construct
  source 1..27: mol_type = other DNA
ctagcaggcttccacgccatcgaggct

SEQ ID NO: 1584 - DNA, 27 bp, synthetic construct
  source 1..27: mol_type = other DNA
ctagcagagggcatgaccggcatcgct

SEQ ID NO: 1585 - DNA, 27 bp, synthetic construct
  source 1..27: mol_type = other DNA
ctagcaggcgaggtgaccaagcacgct

SEQ ID NO: 1586 - DNA, 27 bp, synthetic construct
  source 1..27: mol_type = other DNA
ctagcatacttccacagctacgccgct

SEQ ID NO: 1587 - DNA, 27 bp, synthetic construct
  source 1..27: mol_type = other DNA
ctagcacccctgcagacccaggaggct

SEQ ID NO: 1588 - DNA, 27 bp, synthetic construct
  source 1..27: mol_type = other DNA
ctagcattcccctgcatcaaggaggct

SEQ ID NO: 1589 - DNA, 27 bp, synthetic construct
  source 1..27: mol_type = other DNA
ctagcacaggtggaggtgagcaaggct

SEQ ID NO: 1590 - DNA, 27 bp, synthetic construct
  source 1..27: mol_type = other DNA
ctagcacccggcaacgacctgtgggct

SEQ ID NO: 1591 - DNA, 27 bp, synthetic construct
  source 1..27: mol_type = other DNA
ctagcaaaggacggcggcaagatcgct

SEQ ID NO: 1592 - DNA, 27 bp, synthetic construct
  source 1..27: mol_type = other DNA
ctagcaaaggtggccagcatgaacgct

SEQ ID NO: 1593 - DNA, 27 bp, synthetic construct
  source 1..27: mol_type = other DNA
ctagcaggcaagatcgaggagaacgct

SEQ ID NO: 1594 - DNA, 27 bp, synthetic construct
  source 1..27: mol_type = other DNA
ctagcacccgtgaagcacacctgggct

SEQ ID NO: 1595 - DNA, 27 bp, synthetic construct
  source 1..27: mol_type = other DNA
ctagcactgaacaacgaccagagcgct

SEQ ID NO: 1596 - DNA, 27 bp, synthetic construct
  source 1..27: mol_type = other DNA
ctagcaggcgacatcgtgcggaacgct

SEQ ID NO: 1597 - DNA, 27 bp, synthetic construct
  source 1..27: mol_type = other DNA
ctagcaaacgccgacttccccctggct

SEQ ID NO: 1598 - DNA, 27 bp, synthetic construct
  source 1..27: mol_type = other DNA
ctagcaaaggagggctaccgggacgct

SEQ ID NO: 1599 - DNA, 27 bp, synthetic construct
  source 1..27: mol_type = other DNA
ctagcagaccccatgcccacccacgct

SEQ ID NO: 1600 - DNA, 27 bp, synthetic construct
  source 1..27: mol_type = other DNA
ctagcattctgcaccccccggtacgct

SEQ ID NO: 1601 - DNA, 27 bp, synthetic construct
  source 1..27: mol_type = other DNA
ctagcaaacctgaagaacttcagcgct

SEQ ID NO: 1602 - DNA, 27 bp, synthetic construct
  source 1..27: mol_type = other DNA
ctagcaaacgccatggagaagcacgct

SEQ ID NO: 1603 - DNA, 27 bp, synthetic construct
  source 1..27: mol_type = other DNA
ctagcaaagggccaggcccagaacgct

SEQ ID NO: 1604 - DNA, 27 bp, synthetic construct
  source 1..27: mol_type = other DNA
ctagcagacgaccaggccgtgaacgct

SEQ ID NO: 1605 - DNA, 27 bp, synthetic construct
  source 1..27: mol_type = other DNA
ctagcaaacacctggtgcaagggcgct

SEQ ID NO: 1606 - DNA, 27 bp, synthetic construct
  source 1..27: mol_type = other DNA
ctagcagacgtgggctgcgagaacgct

SEQ ID NO: 1607 - DNA, 27 bp, synthetic construct
  source 1..27: mol_type = other DNA
ctagcaggcagccgggtgaacttcgct

SEQ ID NO: 1608 - DNA, 27 bp, synthetic construct
  source 1..27: mol_type = other DNA
ctagcagcccaccagatggccagcgct

SEQ ID NO: 1609 - DNA, 27 bp, synthetic construct
  source 1..27: mol_type = other DNA
ctagcacgggaggaccaccggcaggct

SEQ ID NO: 1610 - DNA, 27 bp, synthetic construct
  source 1..27: mol_type = other DNA
ctagcagtggagcccggcccccccgct

SEQ ID NO: 1611 - DNA, 27 bp, synthetic construct
  source 1..27: mol_type = other DNA
ctagcaacccgggccgacatcttcgct

SEQ ID NO: 1612 - DNA, 27 bp, synthetic construct
  source 1..27: mol_type = other DNA
ctagcacagaaccagtggaccgacgct

SEQ ID NO: 1613 - DNA, 27 bp, synthetic construct
  source 1..27: mol_type = other DNA
ctagcagacgagaacctgcaggccgct

SEQ ID NO: 1614 - DNA, 27 bp, synthetic construct
  source 1..27: mol_type = other DNA
ctagcagagccccccgacccccccgct

SEQ ID NO: 1615 - DNA, 27 bp, synthetic construct
  source 1..27: mol_type = other DNA
ctagcacaggaggccaagctgaccgct

SEQ ID NO: 1616 - DNA, 27 bp, synthetic construct
  source 1..27: mol_type = other DNA
ctagcacacacccccgacaccttcgct

SEQ ID NO: 1617 - DNA, 27 bp, synthetic construct
  source 1..27: mol_type = other DNA
ctagcagacctgaccctgcgggccgct

SEQ ID NO: 1618 - DNA, 27 bp, synthetic construct
  source 1..27: mol_type = other DNA
ctagcaaaccggtgggccatcgacgct

SEQ ID NO: 1619 - DNA, 27 bp, synthetic construct
  source 1..27: mol_type = other DNA
ctagcaaagcccaccggcaaggacgct

SEQ ID NO: 1620 - DNA, 27 bp, synthetic construct
  source 1..27: mol_type = other DNA
ctagcaaagggccccgccagcatcgct

SEQ ID NO: 1621 - DNA, 27 bp, synthetic construct
  source 1..27: mol_type = other DNA
ctagcaaagggcgtgaccaccgccgct

SEQ ID NO: 1622 - DNA, 24 bp, synthetic construct
  source 1..24: mol_type = other DNA
accagccacgtgagcaccagcagc

SEQ ID NO: 1623 - DNA, 24 bp, synthetic construct
  source 1..24: mol_type = other DNA
agcggcgtgctgttcaccgagggc

SEQ ID NO: 1624 - DNA, 24 bp, synthetic construct
  source 1..24: mol_type = other DNA
agcggccccggcaccagcggcacc

SEQ ID NO: 1625 - DNA, 24 bp, synthetic construct
  source 1..24: mol_type = other DNA
accggcgagggccccaccaagggc

SEQ ID NO: 1626 - DNA, 24 bp, synthetic construct
  source 1..24: mol_type = other DNA
accggcgacaagtggccccagggc

SEQ ID NO: 1627 - DNA, 24 bp, synthetic construct
  source 1..24: mol_type = other DNA
agcggccgggagatccacttcggc

SEQ ID NO: 1628 - DNA, 24 bp, synthetic construct
  source 1..24: mol_type = other DNA
accagccaggagaagcagaacagc

SEQ ID NO: 1629 - DNA, 24 bp, synthetic construct
  source 1..24: mol_type = other DNA
ggcaccatgttcaacaacagcacc

SEQ ID NO: 1630 - DNA, 24 bp, synthetic construct
  source 1..24: mol_type = other DNA
accaccggcatggagcggcccacc

SEQ ID NO: 1631 - DNA, 24 bp, synthetic construct
  source 1..24: mol_type = other DNA
accggcgacgagcggaagcccggc

SEQ ID NO: 1632 - DNA, 18 bp, synthetic construct
  source 1..18: mol_type = other DNA
tgcaaggagatcacccgg

SEQ ID NO: 1633 - DNA, 18 bp, synthetic construct
  source 1..18: mol_type = other DNA
cccgacgtgagcctgctg

SEQ ID NO: 1634 - DNA, 18 bp, synthetic construct
  source 1..18: mol_type = other DNA
cggctgggccggctgagc

SEQ ID NO: 1635 - DNA, 18 bp, synthetic construct
  source 1..18: mol_type = other DNA
cggctgggcaaggtgccc

SEQ ID NO: 1636 - DNA, 18 bp, synthetic construct
  source 1..18: mol_type = other DNA
aagttcaccaaggccgcc

SEQ ID NO: 1637 - DNA, 18 bp, synthetic construct
  source 1..18: mol_type = other DNA
cacttccccgtgttcagc

SEQ ID NO: 1638 - DNA, 18 bp, synthetic construct
  source 1..18: mol_type = other DNA
aacagcaagaagctgggc

SEQ ID NO: 1639 - DNA, 18 bp, synthetic construct
  source 1..18: mol_type = other DNA
aaggccatgcggaccggc

SEQ ID NO: 1640 - DNA, 27 bp, synthetic construct
  source 1..27: mol_type = other DNA
ctagcattcaacagctgcagctacgct

SEQ ID NO: 1641 - DNA, 27 bp, synthetic construct
  source 1..27: mol_type = other DNA
ctagcaggcggcgcctgggactgggct

SEQ ID NO: 1642 - DNA, 27 bp, synthetic construct
  source 1..27: mol_type = other DNA
ctagcaaacgccgacttccccctggct

SEQ ID NO: 1643 - DNA, 27 bp, synthetic construct
  source 1..27: mol_type = other DNA
ctagcagcccaggacgtgagctgggct

SEQ ID NO: 1644 - DNA, 27 bp, synthetic construct
  source 1..27: mol_type = other DNA
ctagcagacgtgggctgcgagaacgct

SEQ ID NO: 1645 - DNA, 27 bp, synthetic construct
  source 1..27: mol_type = other DNA
ctagcagccaccatctgcaccgaggct

SEQ ID NO: 1646 - DNA, 27 bp, synthetic construct
  source 1..27: mol_type = other DNA
ctagcagagggcctgagccagttcgct

SEQ ID NO: 1647 - DNA, 27 bp, synthetic construct
  source 1..27: mol_type = other DNA
ctagcaaagcccaccggcaaggacgct

SEQ ID NO: 1648 - DNA, 27 bp, synthetic construct
  source 1..27: mol_type = other DNA
ctagcacggttccggggcatgtgcgct

SEQ ID NO: 1649 - DNA, 27 bp, synthetic construct
  source 1..27: mol_type = other DNA
ctagcacggcggaagagcaacgaggct

SEQ ID NO: 1650 - DNA, 27 bp, synthetic construct
  source 1..27: mol_type = other DNA
ctagcaccccagaacctggacgaggct

SEQ ID NO: 1651 - DNA, 27 bp, synthetic construct
  source 1..27: mol_type = other DNA
ctagcaatgttcgtgtgggtgcccgct

SEQ ID NO: 1652 - DNA, 27 bp, synthetic construct
  source 1..27: mol_type = other DNA
ctagcatgcacctacacctacgccgct

SEQ ID NO: 1653 - DNA, 27 bp, synthetic construct
  source 1..27: mol_type = other DNA
ctagcaaagatcaacgcccagcccgct

SEQ ID NO: 1654 - DNA, 27 bp, synthetic construct
  source 1..27: mol_type = other DNA
ctagcagacctgagcgaccaccacgct

SEQ ID NO: 1655 - DNA, 27 bp, synthetic construct
  source 1..27: mol_type = other DNA
ctagcacacgagggccggcaggccgct

SEQ ID NO: 1656 - DNA, 27 bp, synthetic construct
  source 1..27: mol_type = other DNA
ctagcagacgcccacagcgtgaccgct

SEQ ID NO: 1657 - DNA, 27 bp, synthetic construct
  source 1..27: mol_type = other DNA
ctagcagacctgggctaccccaacgct

SEQ ID NO: 1658 - DNA, 27 bp, synthetic construct
  source 1..27: mol_type = other DNA
ctagcacagtggttcctgtggcgggct

SEQ ID NO: 1659 - DNA, 27 bp, synthetic construct
  source 1..27: mol_type = other DNA
ctagcatacgccgagcagagcaaggct

SEQ ID NO: 1660 - DNA, 27 bp, synthetic construct
  source 1..27: mol_type = other DNA
ctagcagccaagatgtacaacggcgct

SEQ ID NO: 1661 - DNA, 27 bp, synthetic construct
  source 1..27: mol_type = other DNA
ctagcagaggccgacaagtggtacgct

SEQ ID NO: 1662 - DNA, 27 bp, synthetic construct
  source 1..27: mol_type = other DNA
ctagcaaccgtgtacaagagccccgct

SEQ ID NO: 1663 - DNA, 27 bp, synthetic construct
  source 1..27: mol_type = other DNA
ctagcaagccggaccgccgtggccgct

SEQ ID NO: 1664 - DNA, 27 bp, synthetic construct
  source 1..27: mol_type = other DNA
ctagcagacgacatgatcttcgtggct

SEQ ID NO: 1665 - DNA, 27 bp, synthetic construct
  source 1..27: mol_type = other DNA
ctagcagagttccgggtgggccaggct

SEQ ID NO: 1666 - DNA, 27 bp, synthetic construct
  source 1..27: mol_type = other DNA
ctagcagccgaccccaccttcaaggct

SEQ ID NO: 1667 - DNA, 27 bp, synthetic construct
  source 1..27: mol_type = other DNA
ctagcagtgagccggcacggcgaggct

SEQ ID NO: 1668 - DNA, 27 bp, synthetic construct
  source 1..27: mol_type = other DNA
ctagcacccatgcggggcgtgtacgct

SEQ ID NO: 1669 - DNA, 27 bp, synthetic construct
  source 1..27: mol_type = other DNA
ctagcattccccgacaagagcatcgct

SEQ ID NO: 1670 - DNA, 27 bp, synthetic construct
  source 1..27: mol_type = other DNA
ctagcagagttccacatccccaccgct

SEQ ID NO: 1671 - DNA, 27 bp, synthetic construct
  source 1..27: mol_type = other DNA
ctagcactgaacaacgaccagagcgct

SEQ ID NO: 1672 - DNA, 27 bp, synthetic construct
  source 1..27: mol_type = other DNA
ctagcaaaggccctgggcatggaggct

SEQ ID NO: 1673 - DNA, 27 bp, synthetic construct
  source 1..27: mol_type = other DNA
ctagcatacctgcccctgaagtacgct

SEQ ID NO: 1674 - DNA, 27 bp, synthetic construct
  source 1..27: mol_type = other DNA
ctagcacactaccccagcgcccccgct

SEQ ID NO: 1675 - DNA, 27 bp, synthetic construct
  source 1..27: mol_type = other DNA
ctagcaaacctgaaggagaacgaggct

SEQ ID NO: 1676 - DNA, 27 bp, synthetic construct
  source 1..27: mol_type = other DNA
ctagcacggagcagcaccctgaacgct

SEQ ID NO: 1677 - DNA, 27 bp, synthetic construct
  source 1..27: mol_type = other DNA
ctagcaatcggcgagcggaccaccgct

SEQ ID NO: 1678 - DNA, 27 bp, synthetic construct
  source 1..27: mol_type = other DNA
ctagcatggatcgagcggagcatggct

SEQ ID NO: 1679 - DNA, 27 bp, synthetic construct
  source 1..27: mol_type = other DNA
ctagcatacgacaacaccgccgaggct

SEQ ID NO: 1680 - DNA, 27 bp, synthetic construct
  source 1..27: mol_type = other DNA
ctagcagagcggaaccacggctacgct

SEQ ID NO: 1681 - DNA, 27 bp, synthetic construct
  source 1..27: mol_type = other DNA
ctagcagacatcctggtgggccaggct

SEQ ID NO: 1682 - DNA, 27 bp, synthetic construct
  source 1..27: mol_type = other DNA
ctagcattcaacggcagcaccagcgct

SEQ ID NO: 1683 - DNA, 27 bp, synthetic construct
  source 1..27: mol_type = other DNA
ctagcagactggcggaccacccccgct

SEQ ID NO: 1684 - DNA, 27 bp, synthetic construct
  source 1..27: mol_type = other DNA
ctagcacccagcggcgaccggcacgct

SEQ ID NO: 1685 - DNA, 27 bp, synthetic construct
  source 1..27: mol_type = other DNA
ctagcacaggaggccaagctgaccgct

SEQ ID NO: 1686 - DNA, 27 bp, synthetic construct
  source 1..27: mol_type = other DNA
ctagcagccgagcacaagcagaccgct

SEQ ID NO: 1687 - DNA, 27 bp, synthetic construct
  source 1..27: mol_type = other DNA
ctagcagagaccaccctgacccgggct

SEQ ID NO: 1688 - DNA, 27 bp, synthetic construct
  source 1..27: mol_type = other DNA
ctagcaggcgagagcagctacctggct

SEQ ID NO: 1689 - DNA, 27 bp, synthetic construct
  source 1..27: mol_type = other DNA
ctagcacaggtgcaggtggagggcgct

SEQ ID NO: 1690 - DNA, 27 bp, synthetic construct
  source 1..27: mol_type = other DNA
ctagcagtgaaccgggtggacatggct

SEQ ID NO: 1691 - DNA, 27 bp, synthetic construct
  source 1..27: mol_type = other DNA
ctagcattctgcaccccccggtacgct

SEQ ID NO: 1692 - DNA, 27 bp, synthetic construct
  source 1..27: mol_type = other DNA
ctagcagacgaccaggccgtgaacgct

SEQ ID NO: 1693 - DNA, 27 bp, synthetic construct
  source 1..27: mol_type = other DNA
ctagcacgggaggaccaccggcaggct

SEQ ID NO: 1694 - DNA, 27 bp, synthetic construct
  source 1..27: mol_type = other DNA
ctagcaaaggtggccagcatgaacgct

SEQ ID NO: 1695 - DNA, 27 bp, synthetic construct
  source 1..27: mol_type = other DNA
ctagcaaaggacggcggcaagatcgct

SEQ ID NO: 1696 - DNA, 27 bp, synthetic construct
  source 1..27: mol_type = other DNA
ctagcaaaccggtgggccatcgacgct

SEQ ID NO: 1697 - DNA, 27 bp, synthetic construct
  source 1..27: mol_type = other DNA
ctagcagacctgaccctgcgggccgct

SEQ ID NO: 1698 - DNA, 27 bp, synthetic construct
  source 1..27: mol_type = other DNA
ctagcaaaggagggctaccgggacgct

SEQ ID NO: 1699 - DNA, 27 bp, synthetic construct
  source 1..27: mol_type = other DNA
ctagcaggcaagatcgaggagaacgct

SEQ ID NO: 1700 - DNA, 27 bp, synthetic construct
  source 1..27: mol_type = other DNA
ctagcacccgtgaagcacacctgggct

SEQ ID NO: 1701 - DNA, 27 bp, synthetic construct
  source 1..27: mol_type = other DNA
ctagcacaggtggaggtgagcaaggct

SEQ ID NO: 1702 - DNA, 27 bp, synthetic construct
  source 1..27: mol_type = other DNA
ctagcacccctgcagacccaggaggct

SEQ ID NO: 1703 - DNA, 27 bp, synthetic construct
  source 1..27: mol_type = other DNA
ctagcagcccaccagatggccagcgct

SEQ ID NO: 1704 - DNA, 27 bp, synthetic construct
  source 1..27: mol_type = other DNA
ctagcaaagaaggtggtggacggcgct

SEQ ID NO: 1705 - DNA, 27 bp, synthetic construct
  source 1..27: mol_type = other DNA
ctagcaaagggccccgccagcatcgct

SEQ ID NO: 1706 - DNA, 27 bp, synthetic construct
  source 1..27: mol_type = other DNA
ctagcaaagggccaggcccagaacgct

SEQ ID NO: 1707 - DNA, 24 bp, synthetic construct
  source 1..24: mol_type = other DNA
agcggcgtgctgttcaccgagggc

SEQ ID NO: 1708 - DNA, 24 bp, synthetic construct
  source 1..24: mol_type = other DNA
agcggccccggcaccagcggcacc

SEQ ID NO: 1709 - DNA, 24 bp, synthetic construct
  source 1..24: mol_type = other DNA
accggcgagggccccaccaagggc

SEQ ID NO: 1710 - DNA, 24 bp, synthetic construct
  source 1..24: mol_type = other DNA
agcggcagcgtgggctacgtgggc

SEQ ID NO: 1711 - DNA, 24 bp, synthetic construct
  source 1..24: mol_type = other DNA
agcaccgtgcccctgaacatgggc

SEQ ID NO: 1712 - DNA, 24 bp, synthetic construct
  source 1..24: mol_type = other DNA
agcggccgggagatccacttcggc

SEQ ID NO: 1713 - DNA, 24 bp, synthetic construct
  source 1..24: mol_type = other DNA
ggcaccatgttcaacaacagcacc

SEQ ID NO: 1714 - DNA, 24 bp, synthetic construct
  source 1..24: mol_type = other DNA
accggcgacaagtggccccagggc

SEQ ID NO: 1715 - DNA, 24 bp, synthetic construct
  source 1..24: mol_type = other DNA
accagccaggagaagcagaacagc

SEQ ID NO: 1716 - DNA, 24 bp, synthetic construct
  source 1..24: mol_type = other DNA
accaccggcatggagcggcccacc

SEQ ID NO: 1717 - DNA, 24 bp, synthetic construct
  source 1..24: mol_type = other DNA
accggcgacgagcggaagcccggc

SEQ ID NO: 1718 - DNA, 18 bp, synthetic construct
  source 1..18: mol_type = other DNA
cccgacgtgagcctgctg

SEQ ID NO: 1719 - DNA, 18 bp, synthetic construct
  source 1..18: mol_type = other DNA
cggaccggccggaacacc

SEQ ID NO: 1720 - DNA, 18 bp, synthetic construct
  source 1..18: mol_type = other DNA
aagttcaccaaggccgcc

SEQ ID NO: 1721 - DNA, 18 bp, synthetic construct
  source 1..18: mol_type = other DNA
cggctgggccggctgagc

SEQ ID NO: 1722 - DNA, 18 bp, synthetic construct
  source 1..18: mol_type = other DNA
aaggccatgcggaccggc

SEQ ID NO: 1723 - DNA, 18 bp, synthetic construct
  source 1..18: mol_type = other DNA
cacttccccgtgttcagc

SEQ ID NO: 1724 - DNA, 18 bp, synthetic construct
  source 1..18: mol_type = other DNA
cggctgggcaaggtgccc

SEQ ID NO: 1725 - DNA, 27 bp, synthetic construct
  source 1..27: mol_type = other DNA
ctagcacacggcggcctgcgggaggct

SEQ ID NO: 1726 - DNA, 27 bp, synthetic construct
  source 1..27: mol_type = other DNA
ctagcaaccgaccggaccaagaccgct

SEQ ID NO: 1727 - DNA, 27 bp, synthetic construct
  source 1..27: mol_type = other DNA
ctagcacggcggaagagcaacgaggct

SEQ ID NO: 1728 - DNA, 27 bp, synthetic construct
  source 1..27: mol_type = other DNA
ctagcagtggacaacatctgggccgct

SEQ ID NO: 1729 - DNA, 27 bp, synthetic construct
  source 1..27: mol_type = other DNA
ctagcagaccccctgtacgccgtggct

SEQ ID NO: 1730 - DNA, 27 bp, synthetic construct
  source 1..27: mol_type = other DNA
ctagcaggccaggccatgatgcaggct

SEQ ID NO: 1731 - DNA, 27 bp, synthetic construct
  source 1..27: mol_type = other DNA
ctagcaatgaccaagatcaccgacgct

SEQ ID NO: 1732 - DNA, 27 bp, synthetic construct
  source 1..27: mol_type = other DNA
ctagcattcacccacggcaccaacgct

SEQ ID NO: 1733 - DNA, 27 bp, synthetic construct
  source 1..27: mol_type = other DNA
ctagcagaccccggctggaagtacgct

SEQ ID NO: 1734 - DNA, 27 bp, synthetic construct
  source 1..27: mol_type = other DNA
ctagcaggcggcgagtacgagaccgct

SEQ ID NO: 1735 - DNA, 27 bp, synthetic construct
  source 1..27: mol_type = other DNA
ctagcagccctggtggacgccaacgct

SEQ ID NO: 1736 - DNA, 27 bp, synthetic construct
  source 1..27: mol_type = other DNA
ctagcagaccccaccgagacccccgct

SEQ ID NO: 1737 - DNA, 27 bp, synthetic construct
  source 1..27: mol_type = other DNA
ctagcactggagaacatcggccaggct

SEQ ID NO: 1738 - DNA, 27 bp, synthetic construct
  source 1..27: mol_type = other DNA
ctagcactgaacgacaacgtgggcgct

SEQ ID NO: 1739 - DNA, 27 bp, synthetic construct
  source 1..27: mol_type = other DNA
ctagcacaccgggcccccgacagcgct

SEQ ID NO: 1740 - DNA, 27 bp, synthetic construct
  source 1..27: mol_type = other DNA
ctagcaatgttcgtgtgggtgcccgct

SEQ ID NO: 1741 - DNA, 27 bp, synthetic construct
  source 1..27: mol_type = other DNA
ctagcagagggccaggaggacagcgct

SEQ ID NO: 1742 - DNA, 27 bp, synthetic construct
  source 1..27: mol_type = other DNA
ctagcacccgacgccaaggactgggct

SEQ ID NO: 1743 - DNA, 27 bp, synthetic construct
  source 1..27: mol_type = other DNA
ctagcaccccacatcgccaaggacgct

SEQ ID NO: 1744 - DNA, 27 bp, synthetic construct
  source 1..27: mol_type = other DNA
ctagcagccgtgaccgagtacgtggct

SEQ ID NO: 1745 - DNA, 27 bp, synthetic construct
  source 1..27: mol_type = other DNA
ctagcattctgcatcaagcactgcgct

SEQ ID NO: 1746 - DNA, 27 bp, synthetic construct
  source 1..27: mol_type = other DNA
ctagcaccccccggcaaccccctggct

SEQ ID NO: 1747 - DNA, 27 bp, synthetic construct
  source 1..27: mol_type = other DNA
ctagcacactggcaggaggagtgggct

SEQ ID NO: 1748 - DNA, 27 bp, synthetic construct
  source 1..27: mol_type = other DNA
ctagcagagttccgggtgggccaggct

SEQ ID NO: 1749 - DNA, 27 bp, synthetic construct
  source 1..27: mol_type = other DNA
ctagcatacgtgatcgagaacgacgct

SEQ ID NO: 1750 - DNA, 27 bp, synthetic construct
  source 1..27: mol_type = other DNA
ctagcaagcaccaccatgaacatcgct

SEQ ID NO: 1751 - DNA, 27 bp, synthetic construct
  source 1..27: mol_type = other DNA
ctagcagagttccacatccccaccgct

SEQ ID NO: 1752 - DNA, 27 bp, synthetic construct
  source 1..27: mol_type = other DNA
ctagcaagccggaccgccgtggccgct

SEQ ID NO: 1753 - DNA, 27 bp, synthetic construct
  source 1..27: mol_type = other DNA
ctagcaatcggcagcgacaccagcgct

SEQ ID NO: 1754 - DNA, 27 bp, synthetic construct
  source 1..27: mol_type = other DNA
ctagcagacgacatgatcttcgtggct

SEQ ID NO: 1755 - DNA, 27 bp, synthetic construct
  source 1..27: mol_type = other DNA
ctagcaaagcccccccccaaggacgct

SEQ ID NO: 1756 - DNA, 27 bp, synthetic construct
  source 1..27: mol_type = other DNA
ctagcatacgtggccctgttctacgct

SEQ ID NO: 1757 - DNA, 27 bp, synthetic construct
  source 1..27: mol_type = other DNA
ctagcattccagcagcagcggtgcgct

SEQ ID NO: 1758 - DNA, 27 bp, synthetic construct
  source 1..27: mol_type = other DNA
ctagcagccgtgcacctgatgggcgct

SEQ ID NO: 1759 - DNA, 27 bp, synthetic construct
  source 1..27: mol_type = other DNA
ctagcatgccccgtggccgagtgggct

SEQ ID NO: 1760 - DNA, 27 bp, synthetic construct
  source 1..27: mol_type = other DNA
ctagcagtgcggaacgagatcaacgct

SEQ ID NO: 1761 - DNA, 27 bp, synthetic construct
  source 1..27: mol_type = other DNA
ctagcagacagcagcaagtggatcgct

SEQ ID NO: 1762 - DNA, 27 bp, synthetic construct
  source 1..27: mol_type = other DNA
ctagcagtgatgggcaacatgctggct

SEQ ID NO: 1763 - DNA, 27 bp, synthetic construct
  source 1..27: mol_type = other DNA
ctagcaaacgccaacacccggcccgct

SEQ ID NO: 1764 - DNA, 27 bp, synthetic construct
  source 1..27: mol_type = other DNA
ctagcacccaaccagggcacccccgct

SEQ ID NO: 1765 - DNA, 27 bp, synthetic construct
  source 1..27: mol_type = other DNA
ctagcaggcgagaaccacatcagcgct

SEQ ID NO: 1766 - DNA, 27 bp, synthetic construct
  source 1..27: mol_type = other DNA
ctagcactgaacagcggcaagatggct

SEQ ID NO: 1767 - DNA, 27 bp, synthetic construct
  source 1..27: mol_type = other DNA
ctagcatacgacgccggcggccacgct

SEQ ID NO: 1768 - DNA, 27 bp, synthetic construct
  source 1..27: mol_type = other DNA
ctagcacgggccatcaccaacgaggct

SEQ ID NO: 1769 - DNA, 27 bp, synthetic construct
  source 1..27: mol_type = other DNA
ctagcatggaacaagtgcccctacgct

SEQ ID NO: 1770 - DNA, 27 bp, synthetic construct
  source 1..27: mol_type = other DNA
ctagcaaacctgaaggagaacgaggct

SEQ ID NO: 1771 - DNA, 27 bp, synthetic construct
  source 1..27: mol_type = other DNA
ctagcacaggtgaccgagatgcgggct

SEQ ID NO: 1772 - DNA, 27 bp, synthetic construct
  source 1..27: mol_type = other DNA
ctagcacgggaccagctgaagctggct

SEQ ID NO: 1773 - DNA, 27 bp, synthetic construct
  source 1..27: mol_type = other DNA
ctagcagtgagccggcacggcgaggct

SEQ ID NO: 1774 - DNA, 27 bp, synthetic construct
  source 1..27: mol_type = other DNA
ctagcagccgtgggcatgaagatggct

SEQ ID NO: 1775 - DNA, 27 bp, synthetic construct
  source 1..27: mol_type = other DNA
ctagcagagcacaagaacatgcacgct

SEQ ID NO: 1776 - DNA, 27 bp, synthetic construct
  source 1..27: mol_type = other DNA
ctagcaatgaacgagcccgtgaccgct

SEQ ID NO: 1777 - DNA, 27 bp, synthetic construct
  source 1..27: mol_type = other DNA
ctagcagagttcgtgcacaagggcgct

SEQ ID NO: 1778 - DNA, 27 bp, synthetic construct
  source 1..27: mol_type = other DNA
ctagcagcctaccacgacagcgccgct

SEQ ID NO: 1779 - DNA, 27 bp, synthetic construct
  source 1..27: mol_type = other DNA
ctagcaaaggccctgggcatggaggct

SEQ ID NO: 1780 - DNA, 27 bp, synthetic construct
  source 1..27: mol_type = other DNA
ctagcagtgaagggcctggtgaacgct

SEQ ID NO: 1781 - DNA, 27 bp, synthetic construct
  source 1..27: mol_type = other DNA
ctagcaggcatccagcagcacgtggct

SEQ ID NO: 1782 - DNA, 27 bp, synthetic construct
  source 1..27: mol_type = other DNA
ctagcagacggcggcacccggcccgct

SEQ ID NO: 1783 - DNA, 27 bp, synthetic construct
  source 1..27: mol_type = other DNA
ctagcacacgagcccatgttcaacgct

SEQ ID NO: 1784 - DNA, 27 bp, synthetic construct
  source 1..27: mol_type = other DNA
ctagcaagcgtgagcaccatccaggct

SEQ ID NO: 1785 - DNA, 27 bp, synthetic construct
  source 1..27: mol_type = other DNA
ctagcaagcgccgtgatgtactgggct

SEQ ID NO: 1786 - DNA, 27 bp, synthetic construct
  source 1..27: mol_type = other DNA
ctagcagacaagaaccggctgcaggct

SEQ ID NO: 1787 - DNA, 27 bp, synthetic construct
  source 1..27: mol_type = other DNA
ctagcacccatgggccagaacatggct

SEQ ID NO: 1788 - DNA, 27 bp, synthetic construct
  source 1..27: mol_type = other DNA
ctagcagccgtgggcgtgggctacgct

SEQ ID NO: 1789 - DNA, 27 bp, synthetic construct
  source 1..27: mol_type = other DNA
ctagcaggcgagttcaccggcaaggct

SEQ ID NO: 1790 - DNA, 27 bp, synthetic construct
  source 1..27: mol_type = other DNA
ctagcaggcgaggtgaccaagcacgct

SEQ ID NO: 1791 - DNA, 27 bp, synthetic construct
  source 1..27: mol_type = other DNA
ctagcaatcacccagagcgacatcgct

SEQ ID NO: 1792 - DNA, 27 bp, synthetic construct
  source 1..27: mol_type = other DNA
ctagcaaacgaggcccagggcaaggct

SEQ ID NO: 1793 - DNA, 27 bp, synthetic construct
  source 1..27: mol_type = other DNA
ctagcagccaagcccaaggacggcgct

SEQ ID NO: 1794 - DNA, 27 bp, synthetic construct
  source 1..27: mol_type = other DNA
ctagcagccggccaggcccagagcgct

SEQ ID NO: 1795 - DNA, 27 bp, synthetic construct
  source 1..27: mol_type = other DNA
ctagcacccatgcggggcgtgtacgct

SEQ ID NO: 1796 - DNA, 27 bp, synthetic construct
  source 1..27: mol_type = other DNA
ctagcaagccggctgaacagccccgct

SEQ ID NO: 1797 - DNA, 27 bp, synthetic construct
  source 1..27: mol_type = other DNA
ctagcatgctacccccccacctgcgct

SEQ ID NO: 1798 - DNA, 27 bp, synthetic construct
  source 1..27: mol_type = other DNA
ctagcaaaggtgagcaagggcgacgct

SEQ ID NO: 1799 - DNA, 27 bp, synthetic construct
  source 1..27: mol_type = other DNA
ctagcaggcgagcgggagaccgtggct

SEQ ID NO: 1800 - DNA, 27 bp, synthetic construct
  source 1..27: mol_type = other DNA
ctagcatacatcaccgagaagagcgct

SEQ ID NO: 1801 - DNA, 27 bp, synthetic construct
  source 1..27: mol_type = other DNA
ctagcaagcgccgaccaccagcccgct

SEQ ID NO: 1802 - DNA, 27 bp, synthetic construct
  source 1..27: mol_type = other DNA
ctagcacacatccaggagcccaaggct

SEQ ID NO: 1803 - DNA, 27 bp, synthetic construct
  source 1..27: mol_type = other DNA
ctagcattcaacggcagcaccagcgct

SEQ ID NO: 1804 - DNA, 27 bp, synthetic construct
  source 1..27: mol_type = other DNA
ctagcagagttcgacggcgacggcgct

SEQ ID NO: 1805 - DNA, 27 bp, synthetic construct
  source 1..27: mol_type = other DNA
ctagcatggaagtgcaagggcaccgct

SEQ ID NO: 1806 - DNA, 27 bp, synthetic construct
  source 1..27: mol_type = other DNA
ctagcaatgggccacaactacgtggct

SEQ ID NO: 1807 - DNA, 27 bp, synthetic construct
  source 1..27: mol_type = other DNA
ctagcagtgacccccccctggtacgct

SEQ ID NO: 1808 - DNA, 27 bp, synthetic construct
  source 1..27: mol_type = other DNA
ctagcaggccacgccgcctgcttcgct

SEQ ID NO: 1809 - DNA, 27 bp, synthetic construct
  source 1..27: mol_type = other DNA
ctagcagccgccaaccacgacaacgct

SEQ ID NO: 1810 - DNA, 27 bp, synthetic construct
  source 1..27: mol_type = other DNA
ctagcaaaggaccaccacgtgatcgct

SEQ ID NO: 1811 - DNA, 27 bp, synthetic construct
  source 1..27: mol_type = other DNA
ctagcactgcaccaggagcggcaggct

SEQ ID NO: 1812 - DNA, 27 bp, synthetic construct
  source 1..27: mol_type = other DNA
ctagcagacatgacccggttccacgct

SEQ ID NO: 1813 - DNA, 27 bp, synthetic construct
  source 1..27: mol_type = other DNA
ctagcaaccatgcacaacttcgaggct

SEQ ID NO: 1814 - DNA, 27 bp, synthetic construct
  source 1..27: mol_type = other DNA
ctagcagagtaccacaacaacgacgct

SEQ ID NO: 1815 - DNA, 27 bp, synthetic construct
  source 1..27: mol_type = other DNA
ctagcaggcaagaccatcagcggcgct

SEQ ID NO: 1816 - DNA, 27 bp, synthetic construct
  source 1..27: mol_type = other DNA
ctagcagacttccccagcgagaaggct

SEQ ID NO: 1817 - DNA, 27 bp, synthetic construct
  source 1..27: mol_type = other DNA
ctagcactgaagctgcggaccgaggct

SEQ ID NO: 1818 - DNA, 27 bp, synthetic construct
  source 1..27: mol_type = other DNA
ctagcaatcagccagcccaaccccgct

SEQ ID NO: 1819 - DNA, 27 bp, synthetic construct
  source 1..27: mol_type = other DNA
ctagcattcggcttcagcgccgacgct

SEQ ID NO: 1820 - DNA, 27 bp, synthetic construct
  source 1..27: mol_type = other DNA
ctagcaaaggacaagggcctgatcgct

SEQ ID NO: 1821 - DNA, 27 bp, synthetic construct
  source 1..27: mol_type = other DNA
ctagcaatcggcgagcggaccaccgct

SEQ ID NO: 1822 - DNA, 27 bp, synthetic construct
  source 1..27: mol_type = other DNA
ctagcaccccagaagcagcccgtggct

SEQ ID NO: 1823 - DNA, 27 bp, synthetic construct
  source 1..27: mol_type = other DNA
ctagcaaagttcatgtggatccacgct

SEQ ID NO: 1824 - DNA, 27 bp, synthetic construct
  source 1..27: mol_type = other DNA
ctagcacaggagcagaacgccgccgct

SEQ ID NO: 1825 - DNA, 27 bp, synthetic construct
  source 1..27: mol_type = other DNA
ctagcacaggtgcaggtggagggcgct

SEQ ID NO: 1826 - DNA, 27 bp, synthetic construct
  source 1..27: mol_type = other DNA
ctagcagccctgaacagccagaccgct

SEQ ID NO: 1827 - DNA, 27 bp, synthetic construct
  source 1..27: mol_type = other DNA
ctagcacaccacaaggagagcatcgct

SEQ ID NO: 1828 - DNA, 27 bp, synthetic construct
  source 1..27: mol_type = other DNA
ctagcaccctgctacgagccccccgct

SEQ ID NO: 1829 - DNA, 27 bp, synthetic construct
  source 1..27: mol_type = other DNA
ctagcaaaccagaccacccgggaggct

SEQ ID NO: 1830 - DNA, 27 bp, synthetic construct
  source 1..27: mol_type = other DNA
ctagcagacacccacaccacctacgct

SEQ ID NO: 1831 - DNA, 27 bp, synthetic construct
  source 1..27: mol_type = other DNA
ctagcacagaagaagctgctggaggct

SEQ ID NO: 1832 - DNA, 27 bp, synthetic construct
  source 1..27: mol_type = other DNA
ctagcagtggacatcatgcggggcgct

SEQ ID NO: 1833 - DNA, 27 bp, synthetic construct
  source 1..27: mol_type = other DNA
ctagcacccatccagctggcccaggct

SEQ ID NO: 1834 - DNA, 27 bp, synthetic construct
  source 1..27: mol_type = other DNA
ctagcaaacatcgtgcagcaggacgct

SEQ ID NO: 1835 - DNA, 27 bp, synthetic construct
  source 1..27: mol_type = other DNA
ctagcaaagagcgccggcatcctggct

SEQ ID NO: 1836 - DNA, 27 bp, synthetic construct
  source 1..27: mol_type = other DNA
ctagcacacgacctgcacggcggcgct

SEQ ID NO: 1837 - DNA, 27 bp, synthetic construct
  source 1..27: mol_type = other DNA
ctagcaaagggcttcaagaccgaggct

SEQ ID NO: 1838 - DNA, 27 bp, synthetic construct
  source 1..27: mol_type = other DNA
ctagcaggcagcatggccaagctggct

SEQ ID NO: 1839 - DNA, 27 bp, synthetic construct
  source 1..27: mol_type = other DNA
ctagcaggcttcatggagtactacgct

SEQ ID NO: 1840 - DNA, 27 bp, synthetic construct
  source 1..27: mol_type = other DNA
ctagcacagggcaacaacaccggcgct

SEQ ID NO: 1841 - DNA, 27 bp, synthetic construct
  source 1..27: mol_type = other DNA
ctagcagtgcggaccggcagcatggct

SEQ ID NO: 1842 - DNA, 27 bp, synthetic construct
  source 1..27: mol_type = other DNA
ctagcatacggccagcagaccaccgct

SEQ ID NO: 1843 - DNA, 27 bp, synthetic construct
  source 1..27: mol_type = other DNA
ctagcagactgcatgatgatcaacgct

SEQ ID NO: 1844 - DNA, 27 bp, synthetic construct
  source 1..27: mol_type = other DNA
ctagcaggcgtggtgaagaccgacgct

SEQ ID NO: 1845 - DNA, 27 bp, synthetic construct
  source 1..27: mol_type = other DNA
ctagcaagcgagaacctgaaccgggct

SEQ ID NO: 1846 - DNA, 27 bp, synthetic construct
  source 1..27: mol_type = other DNA
ctagcacaggccggcgacaccgccgct

SEQ ID NO: 1847 - DNA, 27 bp, synthetic construct
  source 1..27: mol_type = other DNA
ctagcaatgcacgagagctacaacgct

SEQ ID NO: 1848 - DNA, 27 bp, synthetic construct
  source 1..27: mol_type = other DNA
ctagcagtgaaccgggtggacatggct

SEQ ID NO: 1849 - DNA, 27 bp, synthetic construct
  source 1..27: mol_type = other DNA
ctagcagtgcccaaggccgacgccgct

SEQ ID NO: 1850 - DNA, 27 bp, synthetic construct
  source 1..27: mol_type = other DNA
ctagcacccagcggcgaccggcacgct

SEQ ID NO: 1851 - DNA, 27 bp, synthetic construct
  source 1..27: mol_type = other DNA
ctagcattccggaccatggagtacgct

SEQ ID NO: 1852 - DNA, 27 bp, synthetic construct
  source 1..27: mol_type = other DNA
ctagcaacctggtgcctggtgtgggct

SEQ ID NO: 1853 - DNA, 27 bp, synthetic construct
  source 1..27: mol_type = other DNA
ctagcagagggcatgaccggcatcgct

SEQ ID NO: 1854 - DNA, 27 bp, synthetic construct
  source 1..27: mol_type = other DNA
ctagcaaaggagggctaccgggacgct

SEQ ID NO: 1855 - DNA, 27 bp, synthetic construct
  source 1..27: mol_type = other DNA
ctagcagccgtgaccaaggacagcgct

SEQ ID NO: 1856 - DNA, 27 bp, synthetic construct
  source 1..27: mol_type = other DNA
ctagcacccctgcagacccaggaggct

SEQ ID NO: 1857 - DNA, 27 bp, synthetic construct
  source 1..27: mol_type = other DNA
ctagcagaccacggcaacaagcccgct

SEQ ID NO: 1858 - DNA, 27 bp, synthetic construct
  source 1..27: mol_type = other DNA
ctagcagacgtggtgagcgtgagcgct

SEQ ID NO: 1859 - DNA, 27 bp, synthetic construct
  source 1..27: mol_type = other DNA
ctagcacaggtggaggtgagcaaggct

SEQ ID NO: 1860 - DNA, 27 bp, synthetic construct
  source 1..27: mol_type = other DNA
ctagcacccagcaagatgggcctggct

SEQ ID NO: 1861 - DNA, 27 bp, synthetic construct
  source 1..27: mol_type = other DNA
ctagcatggatcgagcggagcatggct

SEQ ID NO: 1862 - DNA, 27 bp, synthetic construct
  source 1..27: mol_type = other DNA
ctagcatacgacaacaccgccgaggct

SEQ ID NO: 1863 - DNA, 27 bp, synthetic construct
  source 1..27: mol_type = other DNA
ctagcacacgactggggcgcccccgct

SEQ ID NO: 1864 - DNA, 27 bp, synthetic construct
  source 1..27: mol_type = other DNA
ctagcaatggaccgggagatcaaggct

SEQ ID NO: 1865 - DNA, 27 bp, synthetic construct
  source 1..27: mol_type = other DNA
ctagcagtgttccaggagaccggcgct

SEQ ID NO: 1866 - DNA, 27 bp, synthetic construct
  source 1..27: mol_type = other DNA
ctagcaaaggacggcggcaagatcgct

SEQ ID NO: 1867 - DNA, 27 bp, synthetic construct
  source 1..27: mol_type = other DNA
ctagcactgaacgccgccgccaccgct

SEQ ID NO: 1868 - DNA, 27 bp, synthetic construct
  source 1..27: mol_type = other DNA
ctagcaatccccgtggaggccaacgct

SEQ ID NO: 1869 - DNA, 27 bp, synthetic construct
  source 1..27: mol_type = other DNA
ctagcacggggcaccctgatgaccgct

SEQ ID NO: 1870 - DNA, 27 bp, synthetic construct
  source 1..27: mol_type = other DNA
ctagcaggcgacatcgtgcggaacgct

SEQ ID NO: 1871 - DNA, 27 bp, synthetic construct
  source 1..27: mol_type = other DNA
ctagcaatgctggcctgcaagggcgct

SEQ ID NO: 1872 - DNA, 27 bp, synthetic construct
  source 1..27: mol_type = other DNA
ctagcagacctgagcgaccaccacgct

SEQ ID NO: 1873 - DNA, 27 bp, synthetic construct
  source 1..27: mol_type = other DNA
ctagcaaacatgatggccgccggcgct

SEQ ID NO: 1874 - DNA, 27 bp, synthetic construct
  source 1..27: mol_type = other DNA
ctagcactgcccgagggccggttcgct

SEQ ID NO: 1875 - DNA, 27 bp, synthetic construct
  source 1..27: mol_type = other DNA
ctagcaaagggccaggcccagaacgct

SEQ ID NO: 1876 - DNA, 27 bp, synthetic construct
  source 1..27: mol_type = other DNA
ctagcagccgtgaaggccgtggtggct

SEQ ID NO: 1877 - DNA, 27 bp, synthetic construct
  source 1..27: mol_type = other DNA
ctagcaaaccagggcttcctgaccgct

SEQ ID NO: 1878 - DNA, 27 bp, synthetic construct
  source 1..27: mol_type = other DNA
ctagcagagaccaccctgacccgggct

SEQ ID NO: 1879 - DNA, 27 bp, synthetic construct
  source 1..27: mol_type = other DNA
ctagcagacggcatccagaagaacgct

SEQ ID NO: 1880 - DNA, 27 bp, synthetic construct
  source 1..27: mol_type = other DNA
ctagcaaacgccatggagaagcacgct

SEQ ID NO: 1881 - DNA, 27 bp, synthetic construct
  source 1..27: mol_type = other DNA
ctagcagacatcgtgggcgagagcgct

SEQ ID NO: 1882 - DNA, 27 bp, synthetic construct
  source 1..27: mol_type = other DNA
ctagcaaacgtgaccctgcagagcgct

SEQ ID NO: 1883 - DNA, 27 bp, synthetic construct
  source 1..27: mol_type = other DNA
ctagcattcccctgcatcaaggaggct

SEQ ID NO: 1884 - DNA, 27 bp, synthetic construct
  source 1..27: mol_type = other DNA
ctagcagacgagggccgggagcacgct

SEQ ID NO: 1885 - DNA, 27 bp, synthetic construct
  source 1..27: mol_type = other DNA
ctagcacgggaggaccaccggcaggct

SEQ ID NO: 1886 - DNA, 27 bp, synthetic construct
  source 1..27: mol_type = other DNA
ctagcacagaaccagtggaccgacgct

SEQ ID NO: 1887 - DNA, 27 bp, synthetic construct
  source 1..27: mol_type = other DNA
ctagcacagaaccagaagcagatcgct

SEQ ID NO: 1888 - DNA, 27 bp, synthetic construct
  source 1..27: mol_type = other DNA
ctagcaacccccaacgtgaacgccgct

SEQ ID NO: 1889 - DNA, 27 bp, synthetic construct
  source 1..27: mol_type = other DNA
ctagcacccggcaacgacctgtgggct

SEQ ID NO: 1890 - DNA, 27 bp, synthetic construct
  source 1..27: mol_type = other DNA
ctagcaatgctgggcggcaccagcgct

SEQ ID NO: 1891 - DNA, 27 bp, synthetic construct
  source 1..27: mol_type = other DNA
ctagcaaagaaggtggtggacggcgct

SEQ ID NO: 1892 - DNA, 27 bp, synthetic construct
  source 1..27: mol_type = other DNA
ctagcaggcggcagcaagctggaggct

SEQ ID NO: 1893 - DNA, 27 bp, synthetic construct
  source 1..27: mol_type = other DNA
ctagcactgtaccagtgcgacaccgct

SEQ ID NO: 1894 - DNA, 27 bp, synthetic construct
  source 1..27: mol_type = other DNA
ctagcacaccagggcgccatcatcgct

SEQ ID NO: 1895 - DNA, 27 bp, synthetic construct
  source 1..27: mol_type = other DNA
ctagcaggcttccacgccatcgaggct

SEQ ID NO: 1896 - DNA, 27 bp, synthetic construct
  source 1..27: mol_type = other DNA
ctagcaaacgagggcaccatccgggct

SEQ ID NO: 1897 - DNA, 27 bp, synthetic construct
  source 1..27: mol_type = other DNA
ctagcagaccccatgcccacccacgct

SEQ ID NO: 1898 - DNA, 27 bp, synthetic construct
  source 1..27: mol_type = other DNA
ctagcaggcaagatcgaggagaacgct

SEQ ID NO: 1899 - DNA, 27 bp, synthetic construct
  source 1..27: mol_type = other DNA
ctagcacccgtgaagcacacctgggct

SEQ ID NO: 1900 - DNA, 27 bp, synthetic construct
  source 1..27: mol_type = other DNA
ctagcacggagcagcaccctgaacgct

SEQ ID NO: 1901 - DNA, 27 bp, synthetic construct
  source 1..27: mol_type = other DNA
ctagcagacgaccaggccgtgaacgct

SEQ ID NO: 1902 - DNA, 27 bp, synthetic construct
  source 1..27: mol_type = other DNA
ctagcaaccaagagcaccggcagcgct

SEQ ID NO: 1903 - DNA, 27 bp, synthetic construct
  source 1..27: mol_type = other DNA
ctagcattcctgcggggccccgaggct

SEQ ID NO: 1904 - DNA, 27 bp, synthetic construct
  source 1..27: mol_type = other DNA
ctagcagacgagaacctgcaggccgct

SEQ ID NO: 1905 - DNA, 27 bp, synthetic construct
  source 1..27: mol_type = other DNA
ctagcaaacgccgacttccccctggct

SEQ ID NO: 1906 - DNA, 27 bp, synthetic construct
  source 1..27: mol_type = other DNA
ctagcacccaccaccatcggcggcgct

SEQ ID NO: 1907 - DNA, 27 bp, synthetic construct
  source 1..27: mol_type = other DNA
ctagcaagcgcctgcatgcgggccgct

SEQ ID NO: 1908 - DNA, 27 bp, synthetic construct
  source 1..27: mol_type = other DNA
ctagcaaaggtggccagcatgaacgct

SEQ ID NO: 1909 - DNA, 27 bp, synthetic construct
  source 1..27: mol_type = other DNA
ctagcactgaacaacgaccagagcgct

SEQ ID NO: 1910 - DNA, 27 bp, synthetic construct
  source 1..27: mol_type = other DNA
ctagcaggcggcaagcaggccctggct

SEQ ID NO: 1911 - DNA, 27 bp, synthetic construct
  source 1..27: mol_type = other DNA
ctagcagtggccgtggactgcttcgct

SEQ ID NO: 1912 - DNA, 27 bp, synthetic construct
  source 1..27: mol_type = other DNA
ctagcactggagaccacccagcgggct

SEQ ID NO: 1913 - DNA, 27 bp, synthetic construct
  source 1..27: mol_type = other DNA
ctagcacccaacacccccaagatcgct

SEQ ID NO: 1914 - DNA, 27 bp, synthetic construct
  source 1..27: mol_type = other DNA
ctagcaagcatcggcttcagcgccgct

SEQ ID NO: 1915 - DNA, 27 bp, synthetic construct
  source 1..27: mol_type = other DNA
ctagcagacgtgggctgcgagaacgct

SEQ ID NO: 1916 - DNA, 27 bp, synthetic construct
  source 1..27: mol_type = other DNA
ctagcaggcagccgggtgaacttcgct

SEQ ID NO: 1917 - DNA, 27 bp, synthetic construct
  source 1..27: mol_type = other DNA
ctagcagacctgaccctgcgggccgct

SEQ ID NO: 1918 - DNA, 27 bp, synthetic construct
  source 1..27: mol_type = other DNA
ctagcaaagggccagagccagggcgct

SEQ ID NO: 1919 - DNA, 27 bp, synthetic construct
  source 1..27: mol_type = other DNA
ctagcacacacccccgacaccttcgct

SEQ ID NO: 1920 - DNA, 27 bp, synthetic construct
  source 1..27: mol_type = other DNA
ctagcagcccaccagatggccagcgct

SEQ ID NO: 1921 - DNA, 27 bp, synthetic construct
  source 1..27: mol_type = other DNA
ctagcatgccggagcgactgcgtggct

SEQ ID NO: 1922 - DNA, 27 bp, synthetic construct
  source 1..27: mol_type = other DNA
ctagcaaacacctggtgcaagggcgct

SEQ ID NO: 1923 - DNA, 27 bp, synthetic construct
  source 1..27: mol_type = other DNA
ctagcagccgagcacaagcagaccgct

SEQ ID NO: 1924 - DNA, 27 bp, synthetic construct
  source 1..27: mol_type = other DNA
ctagcagccgagcacatcggccgggct

SEQ ID NO: 1925 - DNA, 27 bp, synthetic construct
  source 1..27: mol_type = other DNA
ctagcagagcaggtgctggagaaggct

SEQ ID NO: 1926 - DNA, 27 bp, synthetic construct
  source 1..27: mol_type = other DNA
ctagcatacttccacagctacgccgct

SEQ ID NO: 1927 - DNA, 27 bp, synthetic construct
  source 1..27: mol_type = other DNA
ctagcagagccccccgacccccccgct

SEQ ID NO: 1928 - DNA, 27 bp, synthetic construct
  source 1..27: mol_type = other DNA
ctagcaacccgggccgacatcttcgct

SEQ ID NO: 1929 - DNA, 27 bp, synthetic construct
  source 1..27: mol_type = other DNA
ctagcagacacctacaagccctacgct

SEQ ID NO: 1930 - DNA, 27 bp, synthetic construct
  source 1..27: mol_type = other DNA
ctagcaaaccggctgagcaacgtggct

SEQ ID NO: 1931 - DNA, 27 bp, synthetic construct
  source 1..27: mol_type = other DNA
ctagcaatgaccaacaccttcctggct

SEQ ID NO: 1932 - DNA, 27 bp, synthetic construct
  source 1..27: mol_type = other DNA
ctagcaggcgagagcagctacctggct

SEQ ID NO: 1933 - DNA, 27 bp, synthetic construct
  source 1..27: mol_type = other DNA
ctagcaaaccggtgggccatcgacgct

SEQ ID NO: 1934 - DNA, 27 bp, synthetic construct
  source 1..27: mol_type = other DNA
ctagcagagaccgtgaagtacatggct

SEQ ID NO: 1935 - DNA, 27 bp, synthetic construct
  source 1..27: mol_type = other DNA
ctagcaatgaagtacgtgttcgacgct

SEQ ID NO: 1936 - DNA, 27 bp, synthetic construct
  source 1..27: mol_type = other DNA
ctagcaaagcgggacaagcccaccgct

SEQ ID NO: 1937 - DNA, 27 bp, synthetic construct
  source 1..27: mol_type = other DNA
ctagcagactggcggaccacccccgct

SEQ ID NO: 1938 - DNA, 27 bp, synthetic construct
  source 1..27: mol_type = other DNA
ctagcaaagggcgtgaccaccgccgct

SEQ ID NO: 1939 - DNA, 27 bp, synthetic construct
  source 1..27: mol_type = other DNA
ctagcattctgcaccccccggtacgct

SEQ ID NO: 1940 - DNA, 27 bp, synthetic construct
  source 1..27: mol_type = other DNA
ctagcaaacctgaagaacttcagcgct

SEQ ID NO: 1941 - DNA, 27 bp, synthetic construct
  source 1..27: mol_type = other DNA
ctagcacactaccccagcgcccccgct

SEQ ID NO: 1942 - DNA, 27 bp, synthetic construct
  source 1..27: mol_type = other DNA
ctagcacaggaggccaagctgaccgct

SEQ ID NO: 1943 - DNA, 27 bp, synthetic construct
  source 1..27: mol_type = other DNA
ctagcagtggagcccggcccccccgct

SEQ ID NO: 1944 - DNA, 27 bp, synthetic construct
  source 1..27: mol_type = other DNA
ctagcaaagggccccgccagcatcgct

SEQ ID NO: 1945 - DNA, 27 bp, synthetic construct
  source 1..27: mol_type = other DNA
ctagcagagggcctgagccagttcgct

SEQ ID NO: 1946 - DNA, 27 bp, synthetic construct
  source 1..27: mol_type = other DNA
ctagcaaagcccaccggcaaggacgct

SEQ ID NO: 1947 - DNA, 27 bp, synthetic construct
  source 1..27: mol_type = other DNA
ctagcaaagggcatgaaggagggcgct

SEQ ID NO: 1948 - DNA, 24 bp, synthetic construct
  source 1..24: mol_type = other DNA
accagccacgtgagcaccagcagc

SEQ ID NO: 1949 - DNA, 24 bp, synthetic construct
  source 1..24: mol_type = other DNA
agcggcgtgctgttcaccgagggc

SEQ ID NO: 1950 - DNA, 24 bp, synthetic construct
  source 1..24: mol_type = other DNA
accagcggcatgggcgccatcggc

SEQ ID NO: 1951 - DNA, 24 bp, synthetic construct
  source 1..24: mol_type = other DNA
accggcgacagcgagcagcagacc

SEQ ID NO: 1952 - DNA, 24 bp, synthetic construct
  source 1..24: mol_type = other DNA
agcggcagcgtgggctacgtgggc

SEQ ID NO: 1953 - DNA, 24 bp, synthetic construct
  source 1..24: mol_type = other DNA
accggcgacaagtggccccagggc

SEQ ID NO: 1954 - DNA, 24 bp, synthetic construct
  source 1..24: mol_type = other DNA
agcggcgagatgaccaagcccggc

SEQ ID NO: 1955 - DNA, 24 bp, synthetic construct
  source 1..24: mol_type = other DNA
agcggccccggcaccagcggcacc

SEQ ID NO: 1956 - DNA, 24 bp, synthetic construct
  source 1..24: mol_type = other DNA
agcagcgagaacaacaagggcggc

SEQ ID NO: 1957 - DNA, 24 bp, synthetic construct
  source 1..24: mol_type = other DNA
accaccgagaaccacaagcccggc

SEQ ID NO: 1958 - DNA, 24 bp, synthetic construct
  source 1..24: mol_type = other DNA
accagccaggagaagcagaacagc

SEQ ID NO: 1959 - DNA, 24 bp, synthetic construct
  source 1..24: mol_type = other DNA
ggcaccatgttcaacaacagcacc

SEQ ID NO: 1960 - DNA, 24 bp, synthetic construct
  source 1..24: mol_type = other DNA
agcggccccaaggagaccggcggc

SEQ ID NO: 1961 - DNA, 24 bp, synthetic construct
  source 1..24: mol_type = other DNA
agcggcatcgacacccggctgggc

SEQ ID NO: 1962 - DNA, 24 bp, synthetic construct
  source 1..24: mol_type = other DNA
accaccggcatggagcggcccacc

SEQ ID NO: 1963 - DNA, 24 bp, synthetic construct
  source 1..24: mol_type = other DNA
accggcgagggccccaccaagggc

SEQ ID NO: 1964 - DNA, 24 bp, synthetic construct
  source 1..24: mol_type = other DNA
accggccccggcacccacaacggc

SEQ ID NO: 1965 - DNA, 24 bp, synthetic construct
  source 1..24: mol_type = other DNA
agcggccgggagatccacttcggc

SEQ ID NO: 1966 - DNA, 24 bp, synthetic construct
  source 1..24: mol_type = other DNA
accggcgacgagcggaagcccggc

SEQ ID NO: 1967 - DNA, 18 bp, synthetic construct
  source 1..18: mol_type = other DNA
agcaccaccaagcccatg

SEQ ID NO: 1968 - DNA, 18 bp, synthetic construct
  source 1..18: mol_type = other DNA
tgcaaggagatcacccgg

SEQ ID NO: 1969 - DNA, 18 bp, synthetic construct
  source 1..18: mol_type = other DNA
cccgacgtgagcctgctg

SEQ ID NO: 1970 - DNA, 18 bp, synthetic construct
  source 1..18: mol_type = other DNA
ttcaacaaggtgctgcac

SEQ ID NO: 1971 - DNA, 18 bp, synthetic construct
  source 1..18: mol_type = other DNA
cggctgggccggctgagc

SEQ ID NO: 1972 - DNA, 18 bp, synthetic construct
  source 1..18: mol_type = other DNA
cggaccggccggaacacc

SEQ ID NO: 1973 - DNA, 18 bp, synthetic construct
  source 1..18: mol_type = other DNA
cgggccctgaagatcagc

SEQ ID NO: 1974 - DNA, 18 bp, synthetic construct
  source 1..18: mol_type = other DNA
aacatcaagaaggccgcc

SEQ ID NO: 1975 - DNA, 18 bp, synthetic construct
  source 1..18: mol_type = other DNA
cggcccggccgggtgagc

SEQ ID NO: 1976 - DNA, 18 bp, synthetic construct
  source 1..18: mol_type = other DNA
cggctgggcaaggtgccc

SEQ ID NO: 1977 - DNA, 18 bp, synthetic construct
  source 1..18: mol_type = other DNA
aacagcaagaagctgggc

SEQ ID NO: 1978 - DNA, 18 bp, synthetic construct
  source 1..18: mol_type = other DNA
aaggccatgcggaccggc

SEQ ID NO: 1979 - DNA, 18 bp, synthetic construct
  source 1..18: mol_type = other DNA
aagttcaccaaggccgcc

SEQ ID NO: 1980 - DNA, 18 bp, synthetic construct
  source 1..18: mol_type = other DNA
cacagcaaggacggcgcc

SEQ ID NO: 1981 - DNA, 18 bp, synthetic construct
  source 1..18: mol_type = other DNA
cacttccccgtgttcagc

SEQ ID NO: 1982 - DNA, 27 bp, synthetic construct
  source 1..27: mol_type = other DNA
ctagcatggcggatcatgaagcacgct

SEQ ID NO: 1983 - DNA, 27 bp, synthetic construct
  source 1..27: mol_type = other DNA
ctagcaagcaacatggagcggatcgct

SEQ ID NO: 1984 - DNA, 27 bp, synthetic construct
  source 1..27: mol_type = other DNA
ctagcagactaccggaacgacaaggct

SEQ ID NO: 1985 - DNA, 27 bp, synthetic construct
  source 1..27: mol_type = other DNA
ctagcacccaaccagggcacccccgct

SEQ ID NO: 1986 - DNA, 27 bp, synthetic construct
  source 1..27: mol_type = other DNA
ctagcaaagcccccccccaaggacgct

SEQ ID NO: 1987 - DNA, 27 bp, synthetic construct
  source 1..27: mol_type = other DNA
ctagcactgcccgagggccggttcgct

SEQ ID NO: 1988 - DNA, 27 bp, synthetic construct
  source 1..27: mol_type = other DNA
ctagcacaccccggcaccaccttcgct

SEQ ID NO: 1989 - DNA, 27 bp, synthetic construct
  source 1..27: mol_type = other DNA
ctagcacggggcgtggcccccatcgct

SEQ ID NO: 1990 - DNA, 27 bp, synthetic construct
  source 1..27: mol_type = other DNA
ctagcacaccgggcccccgacagcgct

SEQ ID NO: 1991 - DNA, 27 bp, synthetic construct
  source 1..27: mol_type = other DNA
ctagcagagctggccctgatcaaggct

SEQ ID NO: 1992 - DNA, 27 bp, synthetic construct
  source 1..27: mol_type = other DNA
ctagcagtggccgtggactgcttcgct

SEQ ID NO: 1993 - DNA, 27 bp, synthetic construct
  source 1..27: mol_type = other DNA
ctagcatgcagcagcacctggtacgct

SEQ ID NO: 1994 - DNA, 27 bp, synthetic construct
  source 1..27: mol_type = other DNA
ctagcagagctggacttcaagtgggct

SEQ ID NO: 1995 - DNA, 27 bp, synthetic construct
  source 1..27: mol_type = other DNA
ctagcacacgagcccatgttcaacgct

SEQ ID NO: 1996 - DNA, 27 bp, synthetic construct
  source 1..27: mol_type = other DNA
ctagcaaaggacggcatgatcggcgct

SEQ ID NO: 1997 - DNA, 27 bp, synthetic construct
  source 1..27: mol_type = other DNA
ctagcacacgagggccggcaggccgct

SEQ ID NO: 1998 - DNA, 27 bp, synthetic construct
  source 1..27: mol_type = other DNA
ctagcagagtaccacaacaacgacgct

SEQ ID NO: 1999 - DNA, 27 bp, synthetic construct
  source 1..27: mol_type = other DNA
ctagcagccgagcacatcggccgggct

SEQ ID NO: 2000 - DNA, 27 bp, synthetic construct
  source 1..27: mol_type = other DNA
ctagcagagcccttccccgtggccgct

SEQ ID NO: 2001 - DNA, 27 bp, synthetic construct
  source 1..27: mol_type = other DNA
ctagcacacatccaggagcccaaggct

SEQ ID NO: 2002 - DNA, 27 bp, synthetic construct
  source 1..27: mol_type = other DNA
ctagcattcaacggcagcaccagcgct

SEQ ID NO: 2003 - DNA, 27 bp, synthetic construct
  source 1..27: mol_type = other DNA
ctagcagacaactgctggtgctgcgct

SEQ ID NO: 2004 - DNA, 27 bp, synthetic construct
  source 1..27: mol_type = other DNA
ctagcatgccccgtggccgagtgggct

SEQ ID NO: 2005 - DNA, 27 bp, synthetic construct
  source 1..27: mol_type = other DNA
ctagcaatgggccacaactacgtggct

SEQ ID NO: 2006 - DNA, 27 bp, synthetic construct
  source 1..27: mol_type = other DNA
ctagcaaaccagggcttcctgaccgct

SEQ ID NO: 2007 - DNA, 27 bp, synthetic construct
  source 1..27: mol_type = other DNA
ctagcacccatgcggggcgtgtacgct

SEQ ID NO: 2008 - DNA, 27 bp, synthetic construct
  source 1..27: mol_type = other DNA
ctagcaaacgaggcccagggcaaggct

SEQ ID NO: 2009 - DNA, 27 bp, synthetic construct
  source 1..27: mol_type = other DNA
ctagcacagaagaagctgctggaggct

SEQ ID NO: 2010 - DNA, 27 bp, synthetic construct
  source 1..27: mol_type = other DNA
ctagcaccctgctacgagccccccgct

SEQ ID NO: 2011 - DNA, 27 bp, synthetic construct
  source 1..27: mol_type = other DNA
ctagcaatcagccagcccaaccccgct

SEQ ID NO: 2012 - DNA, 27 bp, synthetic construct
  source 1..27: mol_type = other DNA
ctagcacaggtgcaggtggagggcgct

SEQ ID NO: 2013 - DNA, 27 bp, synthetic construct
  source 1..27: mol_type = other DNA
ctagcacaggccggcgacaccgccgct

SEQ ID NO: 2014 - DNA, 27 bp, synthetic construct
  source 1..27: mol_type = other DNA
ctagcacggagcagcaccctgaacgct

SEQ ID NO: 2015 - DNA, 27 bp, synthetic construct
  source 1..27: mol_type = other DNA
ctagcagagttccgggtgggccaggct

SEQ ID NO: 2016 - DNA, 27 bp, synthetic construct
  source 1..27: mol_type = other DNA
ctagcaggcagcatggccaagctggct

SEQ ID NO: 2017 - DNA, 27 bp, synthetic construct
  source 1..27: mol_type = other DNA
ctagcacccatccagctggcccaggct

SEQ ID NO: 2018 - DNA, 27 bp, synthetic construct
  source 1..27: mol_type = other DNA
ctagcacccagcggcgaccggcacgct

SEQ ID NO: 2019 - DNA, 27 bp, synthetic construct
  source 1..27: mol_type = other DNA
ctagcaaaccggctgagcaacgtggct

SEQ ID NO: 2020 - DNA, 27 bp, synthetic construct
  source 1..27: mol_type = other DNA
ctagcagaccccatgcccacccacgct

SEQ ID NO: 2021 - DNA, 27 bp, synthetic construct
  source 1..27: mol_type = other DNA
ctagcagtggagcccggcccccccgct

SEQ ID NO: 2022 - DNA, 27 bp, synthetic construct
  source 1..27: mol_type = other DNA
ctagcatacttccacagctacgccgct

SEQ ID NO: 2023 - DNA, 27 bp, synthetic construct
  source 1..27: mol_type = other DNA
ctagcaatgaccaacaccttcctggct

SEQ ID NO: 2024 - DNA, 27 bp, synthetic construct
  source 1..27: mol_type = other DNA
ctagcattcccctgcatcaaggaggct

SEQ ID NO: 2025 - DNA, 27 bp, synthetic construct
  source 1..27: mol_type = other DNA
ctagcacacacccccgacaccttcgct

SEQ ID NO: 2026 - DNA, 27 bp, synthetic construct
  source 1..27: mol_type = other DNA
ctagcaggcgaggtgaccaagcacgct

SEQ ID NO: 2027 - DNA, 27 bp, synthetic construct
  source 1..27: mol_type = other DNA
ctagcaggcgacatcgtgcggaacgct

SEQ ID NO: 2028 - DNA, 27 bp, synthetic construct
  source 1..27: mol_type = other DNA
ctagcaaaccggtgggccatcgacgct

SEQ ID NO: 2029 - DNA, 27 bp, synthetic construct
  source 1..27: mol_type = other DNA
ctagcaaacgccatggagaagcacgct

SEQ ID NO: 2030 - DNA, 27 bp, synthetic construct
  source 1..27: mol_type = other DNA
ctagcagacgagaacctgcaggccgct

SEQ ID NO: 2031 - DNA, 27 bp, synthetic construct
  source 1..27: mol_type = other DNA
ctagcaacccgggccgacatcttcgct

SEQ ID NO: 2032 - DNA, 27 bp, synthetic construct
  source 1..27: mol_type = other DNA
ctagcaaaggacggcggcaagatcgct

SEQ ID NO: 2033 - DNA, 27 bp, synthetic construct
  source 1..27: mol_type = other DNA
ctagcaggcaagatcgaggagaacgct

SEQ ID NO: 2034 - DNA, 27 bp, synthetic construct
  source 1..27: mol_type = other DNA
ctagcacccgtgaagcacacctgggct

SEQ ID NO: 2035 - DNA, 27 bp, synthetic construct
  source 1..27: mol_type = other DNA
ctagcaaaggtggccagcatgaacgct

SEQ ID NO: 2036 - DNA, 27 bp, synthetic construct
  source 1..27: mol_type = other DNA
ctagcacaggtggaggtgagcaaggct

SEQ ID NO: 2037 - DNA, 27 bp, synthetic construct
  source 1..27: mol_type = other DNA
ctagcaaacctgaagaacttcagcgct

SEQ ID NO: 2038 - DNA, 27 bp, synthetic construct
  source 1..27: mol_type = other DNA
ctagcaaagggccaggcccagaacgct

SEQ ID NO: 2039 - DNA, 27 bp, synthetic construct
  source 1..27: mol_type = other DNA
ctagcagacgaccaggccgtgaacgct

SEQ ID NO: 2040 - DNA, 24 bp, synthetic construct
  source 1..24: mol_type = other DNA
accagccaggagaagcagaacagc

SEQ ID NO: 2041 - DNA, 24 bp, synthetic construct
  source 1..24: mol_type = other DNA
agcggccccggcaccagcggcacc

SEQ ID NO: 2042 - DNA, 24 bp, synthetic construct
  source 1..24: mol_type = other DNA
accggcatcgccaccagctacagc

SEQ ID NO: 2043 - DNA, 24 bp, synthetic construct
  source 1..24: mol_type = other DNA
agcggccgggagatccacttcggc

SEQ ID NO: 2044 - DNA, 24 bp, synthetic construct
  source 1..24: mol_type = other DNA
agcggcatcgacacccggctgggc

SEQ ID NO: 2045 - DNA, 24 bp, synthetic construct
  source 1..24: mol_type = other DNA
ggcaccatgttcaacaacagcacc

SEQ ID NO: 2046 - DNA, 24 bp, synthetic construct
  source 1..24: mol_type = other DNA
accaccggcatggagcggcccacc

SEQ ID NO: 2047 - DNA, 24 bp, synthetic construct
  source 1..24: mol_type = other DNA
accggcgacgagcggaagcccggc

SEQ ID NO: 2048 - DNA, 18 bp, synthetic construct
  source 1..18: mol_type = other DNA
tgcaaggagatcacccgg

SEQ ID NO: 2049 - DNA, 18 bp, synthetic construct
  source 1..18: mol_type = other DNA
cccgacgtgagcctgctg

SEQ ID NO: 2050 - DNA, 18 bp, synthetic construct
  source 1..18: mol_type = other DNA
aacatcaagaaggccgcc

SEQ ID NO: 2051 - DNA, 18 bp, synthetic construct
  source 1..18: mol_type = other DNA
cggctgggccggctgagc

SEQ ID NO: 2052 - DNA, 18 bp, synthetic construct
  source 1..18: mol_type = other DNA
aaggccatgcggaccggc

SEQ ID NO: 2053 - DNA, 18 bp, synthetic construct
  source 1..18: mol_type = other DNA
aagttcaccaaggccgcc

SEQ ID NO: 2054 - DNA, 18 bp, synthetic construct
  source 1..18: mol_type = other DNA
cggctgggcaaggtgccc

SEQ ID NO: 2055 - DNA, 27 bp, synthetic construct
  source 1..27: mol_type = other DNA
ctagcacacggcggcctgcgggaggct

SEQ ID NO: 2056 - DNA, 27 bp, synthetic construct
  source 1..27: mol_type = other DNA
ctagcattcacccacggcaccaacgct

SEQ ID NO: 2057 - DNA, 27 bp, synthetic construct
  source 1..27: mol_type = other DNA
ctagcagaccccaccgagacccccgct

SEQ ID NO: 2058 - DNA, 27 bp, synthetic construct
  source 1..27: mol_type = other DNA
ctagcactgaacgacaacgtgggcgct

SEQ ID NO: 2059 - DNA, 27 bp, synthetic construct
  source 1..27: mol_type = other DNA
ctagcattctgcatcaagcactgcgct

SEQ ID NO: 2060 - DNA, 27 bp, synthetic construct
  source 1..27: mol_type = other DNA
ctagcacactggcaggaggagtgggct

SEQ ID NO: 2061 - DNA, 27 bp, synthetic construct
  source 1..27: mol_type = other DNA
ctagcatacgtgatcgagaacgacgct

SEQ ID NO: 2062 - DNA, 27 bp, synthetic construct
  source 1..27: mol_type = other DNA
ctagcaagcaccaccatgaacatcgct

SEQ ID NO: 2063 - DNA, 27 bp, synthetic construct
  source 1..27: mol_type = other DNA
ctagcatacgtggccctgttctacgct

SEQ ID NO: 2064 - DNA, 27 bp, synthetic construct
  source 1..27: mol_type = other DNA
ctagcattccagcagcagcggtgcgct

SEQ ID NO: 2065 - DNA, 27 bp, synthetic construct
  source 1..27: mol_type = other DNA
ctagcagacagcagcaagtggatcgct

SEQ ID NO: 2066 - DNA, 27 bp, synthetic construct
  source 1..27: mol_type = other DNA
ctagcagtgatgggcaacatgctggct

SEQ ID NO: 2067 - DNA, 27 bp, synthetic construct
  source 1..27: mol_type = other DNA
ctagcaaacgccaacacccggcccgct

SEQ ID NO: 2068 - DNA, 27 bp, synthetic construct
  source 1..27: mol_type = other DNA
ctagcaggcgagaaccacatcagcgct

SEQ ID NO: 2069 - DNA, 27 bp, synthetic construct
  source 1..27: mol_type = other DNA
ctagcaagcgtgagcaccatccaggct

SEQ ID NO: 2070 - DNA, 27 bp, synthetic construct
  source 1..27: mol_type = other DNA
ctagcagcctaccacgacagcgccgct

SEQ ID NO: 2071 - DNA, 27 bp, synthetic construct
  source 1..27: mol_type = other DNA
ctagcagtgaagggcctggtgaacgct

SEQ ID NO: 2072 - DNA, 27 bp, synthetic construct
  source 1..27: mol_type = other DNA
ctagcagacggcggcacccggcccgct

SEQ ID NO: 2073 - DNA, 27 bp, synthetic construct
  source 1..27: mol_type = other DNA
ctagcatgctacccccccacctgcgct

SEQ ID NO: 2074 - DNA, 27 bp, synthetic construct
  source 1..27: mol_type = other DNA
ctagcaaaggtgagcaagggcgacgct

SEQ ID NO: 2075 - DNA, 27 bp, synthetic construct
  source 1..27: mol_type = other DNA
ctagcatggaagtgcaagggcaccgct

SEQ ID NO: 2076 - DNA, 27 bp, synthetic construct
  source 1..27: mol_type = other DNA
ctagcagacatgacccggttccacgct

SEQ ID NO: 2077 - DNA, 27 bp, synthetic construct
  source 1..27: mol_type = other DNA
ctagcaggcaagaccatcagcggcgct

SEQ ID NO: 2078 - DNA, 27 bp, synthetic construct
  source 1..27: mol_type = other DNA
ctagcactgaagctgcggaccgaggct

SEQ ID NO: 2079 - DNA, 27 bp, synthetic construct
  source 1..27: mol_type = other DNA
ctagcagccgtgaccaaggacagcgct

SEQ ID NO: 2080 - DNA, 27 bp, synthetic construct
  source 1..27: mol_type = other DNA
ctagcaaaggacaagggcctgatcgct

SEQ ID NO: 2081 - DNA, 27 bp, synthetic construct
  source 1..27: mol_type = other DNA
ctagcacaccacaaggagagcatcgct

SEQ ID NO: 2082 - DNA, 27 bp, synthetic construct
  source 1..27: mol_type = other DNA
ctagcagtggacatcatgcggggcgct

SEQ ID NO: 2083 - DNA, 27 bp, synthetic construct
  source 1..27: mol_type = other DNA
ctagcaaacatcgtgcagcaggacgct

SEQ ID NO: 2084 - DNA, 27 bp, synthetic construct
  source 1..27: mol_type = other DNA
ctagcaggcgagcgggagaccgtggct

SEQ ID NO: 2085 - DNA, 27 bp, synthetic construct
  source 1..27: mol_type = other DNA
ctagcagacgtggtgagcgtgagcgct

SEQ ID NO: 2086 - DNA, 27 bp, synthetic construct
  source 1..27: mol_type = other DNA
ctagcaacccccaacgtgaacgccgct

SEQ ID NO: 2087 - DNA, 27 bp, synthetic construct
  source 1..27: mol_type = other DNA
ctagcactgaacgccgccgccaccgct

SEQ ID NO: 2088 - DNA, 27 bp, synthetic construct
  source 1..27: mol_type = other DNA
ctagcagactgcatgatgatcaacgct

SEQ ID NO: 2089 - DNA, 27 bp, synthetic construct
  source 1..27: mol_type = other DNA
ctagcaatgctggcctgcaagggcgct

SEQ ID NO: 2090 - DNA, 27 bp, synthetic construct
  source 1..27: mol_type = other DNA
ctagcaaacatgatggccgccggcgct

SEQ ID NO: 2091 - DNA, 27 bp, synthetic construct
  source 1..27: mol_type = other DNA
ctagcagacaagaaccggctgcaggct

SEQ ID NO: 2092 - DNA, 27 bp, synthetic construct
  source 1..27: mol_type = other DNA
ctagcagccgtgggcatgaagatggct

SEQ ID NO: 2093 - DNA, 27 bp, synthetic construct
  source 1..27: mol_type = other DNA
ctagcagacgacatgatcttcgtggct

SEQ ID NO: 2094 - DNA, 27 bp, synthetic construct
  source 1..27: mol_type = other DNA
ctagcagacatcgtgggcgagagcgct

SEQ ID NO: 2095 - DNA, 27 bp, synthetic construct
  source 1..27: mol_type = other DNA
ctagcaggcggcaagcaggccctggct

SEQ ID NO: 2096 - DNA, 27 bp, synthetic construct
  source 1..27: mol_type = other DNA
ctagcacagaaccagaagcagatcgct

SEQ ID NO: 2097 - DNA, 27 bp, synthetic construct
  source 1..27: mol_type = other DNA
ctagcagagaccaccctgacccgggct

SEQ ID NO: 2098 - DNA, 27 bp, synthetic construct
  source 1..27: mol_type = other DNA
ctagcaatgctgggcggcaccagcgct

SEQ ID NO: 2099 - DNA, 27 bp, synthetic construct
  source 1..27: mol_type = other DNA
ctagcaggcttcatggagtactacgct

SEQ ID NO: 2100 - DNA, 27 bp, synthetic construct
  source 1..27: mol_type = other DNA
ctagcatacggccagcagaccaccgct

SEQ ID NO: 2101 - DNA, 27 bp, synthetic construct
  source 1..27: mol_type = other DNA
ctagcactgaacaacgaccagagcgct

SEQ ID NO: 2102 - DNA, 27 bp, synthetic construct
  source 1..27: mol_type = other DNA
ctagcattcctgcggggccccgaggct

SEQ ID NO: 2103 - DNA, 27 bp, synthetic construct
  source 1..27: mol_type = other DNA
ctagcatgccccgtggccgagtgggct

SEQ ID NO: 2104 - DNA, 27 bp, synthetic construct
  source 1..27: mol_type = other DNA
ctagcactggagaccacccagcgggct

SEQ ID NO: 2105 - DNA, 27 bp, synthetic construct
  source 1..27: mol_type = other DNA
ctagcagacacctacaagccctacgct

SEQ ID NO: 2106 - DNA, 27 bp, synthetic construct
  source 1..27: mol_type = other DNA
ctagcaaagcgggacaagcccaccgct

SEQ ID NO: 2107 - DNA, 27 bp, synthetic construct
  source 1..27: mol_type = other DNA
ctagcatacttccacagctacgccgct

SEQ ID NO: 2108 - DNA, 27 bp, synthetic construct
  source 1..27: mol_type = other DNA
ctagcaatgaccaacaccttcctggct

SEQ ID NO: 2109 - DNA, 27 bp, synthetic construct
  source 1..27: mol_type = other DNA
ctagcaggcgagagcagctacctggct

SEQ ID NO: 2110 - DNA, 27 bp, synthetic construct
  source 1..27: mol_type = other DNA
ctagcagccgagcacatcggccgggct

SEQ ID NO: 2111 - DNA, 27 bp, synthetic construct
  source 1..27: mol_type = other DNA
ctagcagactggcggaccacccccgct

SEQ ID NO: 2112 - DNA, 27 bp, synthetic construct
  source 1..27: mol_type = other DNA
ctagcagagggcctgagccagttcgct

SEQ ID NO: 2113 - DNA, 27 bp, synthetic construct
  source 1..27: mol_type = other DNA
ctagcaaagcccaccggcaaggacgct

SEQ ID NO: 2114 - DNA, 24 bp, synthetic construct
  source 1..24: mol_type = other DNA
accggcgagggccccaccaagggc

SEQ ID NO: 2115 - DNA, 18 bp, synthetic construct
  source 1..18: mol_type = other DNA
cgggccctgaagatcagc

SEQ ID NO: 2116 - DNA, 18 bp, synthetic construct
  source 1..18: mol_type = other DNA
aacagcaagaagctgggc

SEQ ID NO: 2117 - DNA, 18 bp, synthetic construct
  source 1..18: mol_type = other DNA
cacttccccgtgttcagc

SEQ ID NO: 2118 - DNA, 27 bp, synthetic construct
  source 1..27: mol_type = other DNA
ctagcaaccgaccggaccaagaccgct

SEQ ID NO: 2119 - DNA, 27 bp, synthetic construct
  source 1..27: mol_type = other DNA
ctagcagtggacaacatctgggccgct

SEQ ID NO: 2120 - DNA, 27 bp, synthetic construct
  source 1..27: mol_type = other DNA
ctagcaggccaggccatgatgcaggct

SEQ ID NO: 2121 - DNA, 27 bp, synthetic construct
  source 1..27: mol_type = other DNA
ctagcaatgaccaagatcaccgacgct

SEQ ID NO: 2122 - DNA, 27 bp, synthetic construct
  source 1..27: mol_type = other DNA
ctagcaggcggcgagtacgagaccgct

SEQ ID NO: 2123 - DNA, 27 bp, synthetic construct
  source 1..27: mol_type = other DNA
ctagcagccctggtggacgccaacgct

SEQ ID NO: 2124 - DNA, 27 bp, synthetic construct
  source 1..27: mol_type = other DNA
ctagcactggagaacatcggccaggct

SEQ ID NO: 2125 - DNA, 27 bp, synthetic construct
  source 1..27: mol_type = other DNA
ctagcacaccgggcccccgacagcgct

SEQ ID NO: 2126 - DNA, 27 bp, synthetic construct
  source 1..27: mol_type = other DNA
ctagcagagggccaggaggacagcgct

SEQ ID NO: 2127 - DNA, 27 bp, synthetic construct
  source 1..27: mol_type = other DNA
ctagcaccccacatcgccaaggacgct

SEQ ID NO: 2128 - DNA, 27 bp, synthetic construct
  source 1..27: mol_type = other DNA
ctagcacgggaccagctgaagctggct

SEQ ID NO: 2129 - DNA, 27 bp, synthetic construct
  source 1..27: mol_type = other DNA
ctagcactgaacagcggcaagatggct

SEQ ID NO: 2130 - DNA, 27 bp, synthetic construct
  source 1..27: mol_type = other DNA
ctagcagtgagccggcacggcgaggct

SEQ ID NO: 2131 - DNA, 27 bp, synthetic construct
  source 1..27: mol_type = other DNA
ctagcaatgaacgagcccgtgaccgct

SEQ ID NO: 2132 - DNA, 27 bp, synthetic construct
  source 1..27: mol_type = other DNA
ctagcatacatcaccgagaagagcgct

SEQ ID NO: 2133 - DNA, 27 bp, synthetic construct
  source 1..27: mol_type = other DNA
ctagcatacgacgccggcggccacgct

SEQ ID NO: 2134 - DNA, 27 bp, synthetic construct
  source 1..27: mol_type = other DNA
ctagcactgcaccaggagcggcaggct

SEQ ID NO: 2135 - DNA, 27 bp, synthetic construct
  source 1..27: mol_type = other DNA
ctagcagccaagcccaaggacggcgct

SEQ ID NO: 2136 - DNA, 27 bp, synthetic construct
  source 1..27: mol_type = other DNA
ctagcagagtaccacaacaacgacgct

SEQ ID NO: 2137 - DNA, 27 bp, synthetic construct
  source 1..27: mol_type = other DNA
ctagcaacctggtgcctggtgtgggct

SEQ ID NO: 2138 - DNA, 27 bp, synthetic construct
  source 1..27: mol_type = other DNA
ctagcattcggcttcagcgccgacgct

SEQ ID NO: 2139 - DNA, 27 bp, synthetic construct
  source 1..27: mol_type = other DNA
ctagcaggcgtggtgaagaccgacgct

SEQ ID NO: 2140 - DNA, 27 bp, synthetic construct
  source 1..27: mol_type = other DNA
ctagcaaagttcatgtggatccacgct

SEQ ID NO: 2141 - DNA, 27 bp, synthetic construct
  source 1..27: mol_type = other DNA
ctagcaaaccagggcttcctgaccgct

SEQ ID NO: 2142 - DNA, 27 bp, synthetic construct
  source 1..27: mol_type = other DNA
ctagcacacgacctgcacggcggcgct

SEQ ID NO: 2143 - DNA, 27 bp, synthetic construct
  source 1..27: mol_type = other DNA
ctagcaagcgagaacctgaaccgggct

SEQ ID NO: 2144 - DNA, 27 bp, synthetic construct
  source 1..27: mol_type = other DNA
ctagcattccggaccatggagtacgct

SEQ ID NO: 2145 - DNA, 27 bp, synthetic construct
  source 1..27: mol_type = other DNA
ctagcagccgccaaccacgacaacgct

SEQ ID NO: 2146 - DNA, 27 bp, synthetic construct
  source 1..27: mol_type = other DNA
ctagcacccagcaagatgggcctggct

SEQ ID NO: 2147 - DNA, 27 bp, synthetic construct
  source 1..27: mol_type = other DNA
ctagcaaacgagggcaccatccgggct

SEQ ID NO: 2148 - DNA, 27 bp, synthetic construct
  source 1..27: mol_type = other DNA
ctagcacggggcaccctgatgaccgct

SEQ ID NO: 2149 - DNA, 27 bp, synthetic construct
  source 1..27: mol_type = other DNA
ctagcaaccaagagcaccggcagcgct

SEQ ID NO: 2150 - DNA, 27 bp, synthetic construct
  source 1..27: mol_type = other DNA
ctagcagccctgaacagccagaccgct

SEQ ID NO: 2151 - DNA, 27 bp, synthetic construct
  source 1..27: mol_type = other DNA
ctagcaaacgtgaccctgcagagcgct

SEQ ID NO: 2152 - DNA, 27 bp, synthetic construct
  source 1..27: mol_type = other DNA
ctagcagccggccaggcccagagcgct

SEQ ID NO: 2153 - DNA, 27 bp, synthetic construct
  source 1..27: mol_type = other DNA
ctagcacacgactggggcgcccccgct

SEQ ID NO: 2154 - DNA, 27 bp, synthetic construct
  source 1..27: mol_type = other DNA
ctagcaatggaccgggagatcaaggct

SEQ ID NO: 2155 - DNA, 27 bp, synthetic construct
  source 1..27: mol_type = other DNA
ctagcaaacgccgacttccccctggct

SEQ ID NO: 2156 - DNA, 27 bp, synthetic construct
  source 1..27: mol_type = other DNA
ctagcacaccagggcgccatcatcgct

SEQ ID NO: 2157 - DNA, 27 bp, synthetic construct
  source 1..27: mol_type = other DNA
ctagcacccaacacccccaagatcgct

SEQ ID NO: 2158 - DNA, 27 bp, synthetic construct
  source 1..27: mol_type = other DNA
ctagcaatccccgtggaggccaacgct

SEQ ID NO: 2159 - DNA, 27 bp, synthetic construct
  source 1..27: mol_type = other DNA
ctagcaatcggcgagcggaccaccgct

SEQ ID NO: 2160 - DNA, 27 bp, synthetic construct
  source 1..27: mol_type = other DNA
ctagcatgccggagcgactgcgtggct

SEQ ID NO: 2161 - DNA, 27 bp, synthetic construct
  source 1..27: mol_type = other DNA
ctagcaaaccggctgagcaacgtggct

SEQ ID NO: 2162 - DNA, 27 bp, synthetic construct
  source 1..27: mol_type = other DNA
ctagcacaggagcagaacgccgccgct

SEQ ID NO: 2163 - DNA, 27 bp, synthetic construct
  source 1..27: mol_type = other DNA
ctagcacggagcagcaccctgaacgct

SEQ ID NO: 2164 - DNA, 27 bp, synthetic construct
  source 1..27: mol_type = other DNA
ctagcaatgaagtacgtgttcgacgct

SEQ ID NO: 2165 - DNA, 27 bp, synthetic construct
  source 1..27: mol_type = other DNA
ctagcacaggaggccaagctgaccgct

SEQ ID NO: 2166 - DNA, 27 bp, synthetic construct
  source 1..27: mol_type = other DNA
ctagcacgggaggaccaccggcaggct

SEQ ID NO: 2167 - DNA, 27 bp, synthetic construct
  source 1..27: mol_type = other DNA
ctagcacactaccccagcgcccccgct

SEQ ID NO: 2168 - DNA, 27 bp, synthetic construct
  source 1..27: mol_type = other DNA
ctagcaaagggcatgaaggagggcgct

SEQ ID NO: 2169 - DNA, 24 bp, synthetic construct
  source 1..24: mol_type = other DNA
accagccacgtgagcaccagcagc

SEQ ID NO: 2170 - DNA, 24 bp, synthetic construct
  source 1..24: mol_type = other DNA
agcggcgtgctgttcaccgagggc

SEQ ID NO: 2171 - DNA, 24 bp, synthetic construct
  source 1..24: mol_type = other DNA
accagcggcatgggcgccatcggc

SEQ ID NO: 2172 - DNA, 24 bp, synthetic construct
  source 1..24: mol_type = other DNA
accggcgacagcgagcagcagacc

SEQ ID NO: 2173 - DNA, 24 bp, synthetic construct
  source 1..24: mol_type = other DNA
agcggcagcgtgggctacgtgggc

SEQ ID NO: 2174 - DNA, 24 bp, synthetic construct
  source 1..24: mol_type = other DNA
agcagcgagaacaacaagggcggc

SEQ ID NO: 2175 - DNA, 24 bp, synthetic construct
  source 1..24: mol_type = other DNA
agcggccccggcaccagcggcacc

SEQ ID NO: 2176 - DNA, 24 bp, synthetic construct
  source 1..24: mol_type = other DNA
accaccgagaaccacaagcccggc

SEQ ID NO: 2177 - DNA, 18 bp, synthetic construct
  source 1..18: mol_type = other DNA
ttcaacaaggtgctgcac

SEQ ID NO: 2178 - DNA, 18 bp, synthetic construct
  source 1..18: mol_type = other DNA
cggaccggccggaacacc

SEQ ID NO: 2179 - DNA, 18 bp, synthetic construct
  source 1..18: mol_type = other DNA
cggctgggcaaggtgccc

SEQ ID NO: 2180 - DNA, 27 bp, synthetic construct
  source 1..27: mol_type = other DNA
ctagcatggatcgagcggagcatggct

SEQ ID NO: 2181 - DNA, 27 bp, synthetic construct
  source 1..27: mol_type = other DNA
ctagcatacgacaacaccgccgaggct

SEQ ID NO: 2182 - DNA, 27 bp, synthetic construct
  source 1..27: mol_type = other DNA
ctagcacaggtgaccgagatgcgggct

SEQ ID NO: 2183 - DNA, 27 bp, synthetic construct
  source 1..27: mol_type = other DNA
ctagcaacccgggccgacatcttcgct

SEQ ID NO: 2184 - DNA, 27 bp, synthetic construct
  source 1..27: mol_type = other DNA
ctagcaaaggacggcggcaagatcgct

SEQ ID NO: 2185 - DNA, 27 bp, synthetic construct
  source 1..27: mol_type = other DNA
ctagcacaggtggaggtgagcaaggct

SEQ ID NO: 2186 - DNA, 27 bp, synthetic construct
  source 1..27: mol_type = other DNA
ctagcagacacctacaagccctacgct

SEQ ID NO: 2187 - DNA, 27 bp, synthetic construct
  source 1..27: mol_type = other DNA
ctagcacaggaggccaagctgaccgct

SEQ ID NO: 2188 - DNA, 27 bp, synthetic construct
  source 1..27: mol_type = other DNA
ctagcatgccggagcgactgcgtggct

SEQ ID NO: 2189 - DNA, 27 bp, synthetic construct
  source 1..27: mol_type = other DNA
ctagcaaaggaccaccacgtgatcgct

SEQ ID NO: 2190 - DNA, 27 bp, synthetic construct
  source 1..27: mol_type = other DNA
ctagcagagccccccgacccccccgct

SEQ ID NO: 2191 - DNA, 27 bp, synthetic construct
  source 1..27: mol_type = other DNA
ctagcatgcagcagcacctggtacgct

SEQ ID NO: 2192 - DNA, 27 bp, synthetic construct
  source 1..27: mol_type = other DNA
ctagcagacctgaccctgcgggccgct

SEQ ID NO: 2193 - DNA, 27 bp, synthetic construct
  source 1..27: mol_type = other DNA
ctagcaaaggtggccagcatgaacgct

SEQ ID NO: 2194 - DNA, 27 bp, synthetic construct
  source 1..27: mol_type = other DNA
ctagcagcccaggacgtgagctgggct

SEQ ID NO: 2195 - DNA, 27 bp, synthetic construct
  source 1..27: mol_type = other DNA
ctagcagacgtgggctgcgagaacgct

SEQ ID NO: 2196 - DNA, 24 bp, synthetic construct
  source 1..24: mol_type = other DNA
accggccccggcacccacaacggc

SEQ ID NO: 2197 - DNA, 24 bp, synthetic construct
  source 1..24: mol_type = other DNA
agcaccgtgcccctgaacatgggc

SEQ ID NO: 2198 - DNA, 18 bp, synthetic construct
  source 1..18: mol_type = other DNA
cacagcaaggacggcgcc

SEQ ID NO: 2199 - DNA, 18 bp, synthetic construct
  source 1..18: mol_type = other DNA
cggaccggccggaacacc

SEQ ID NO: 2200 - DNA, 18 bp, synthetic construct
  source 1..18: mol_type = other DNA
aacagcaagaagctgggc

SEQ ID NO: 2201 - DNA, 18 bp, synthetic construct
  source 1..18: mol_type = other DNA
cggcccggccgggtgagc

SEQ ID NO: 2202 - DNA, 18 bp, synthetic construct
  source 1..18: mol_type = other DNA
aagttccggcacaccgag

SEQ ID NO: 2203 - DNA, 18 bp, synthetic construct
  source 1..18: mol_type = other DNA
aaggccatgcggaccggc

SEQ ID NO: 2204 - DNA, 18 bp, synthetic construct
  source 1..18: mol_type = other DNA
aacatcaagaaggccgcc

SEQ ID NO: 2205 - DNA, 18 bp, synthetic construct
  source 1..18: mol_type = other DNA
aagttcaccaaggccgcc

SEQ ID NO: 2206 - protein, 735 aa, synthetic construct
  VARIANT 67: note = E or A
  VARIANT 708: note = V or I
MAADGYLPDWLEDTLSEGIRQWWKLKPGPPPPKPAERHKDDSRGLVLPGYKYLGPFNGLDKGEPVNXADAAALEHDKAYDRQLDSGDNPYLKYNHADAEFQERLKEDTSFGGNLGRAVFQAKKRVLEPLGLVEEPVKTAPGKKRPVEHSPVEPDSSSGTGKAGQQPARKRLNFGQTGDADSVPDPQPLGQPPAAPSGLGTNTMATGSGAPMADNNEGADGVGNSSGNWHCDSTWMGDRVITTSTRTWALPTYNNHLYKQISSQSGASNDNHYFGYSTPWGYFDFNRFHCHFSPRDWQRLINNNWGFRPKRLNFKLFNIQVKEVTQNDGTTTIANNLTSTVQVFTDSEYQLPYVLGSAHQGCLPPFPADVFMVPQYGYLTLNNGSQAVGRSSFYCLEYFPSQMLRTGNNFTFSYTFEDVPFHSSYAHSQSLDRLMNPLIDQYLYYLSRTNTPSGTTTQSRLQFSQAGASDIRDQSRNWLPGPCYRQQRVSKTSADNNNSEYSWTGATKYHLNGRDSLVNPGPAMASHKDDEEKFFPQSGVLIFGKQGSEKTNVDIEKVMITDEEEIRTTNPVATEQYGSVSTNLQRGNRQAATADVNTQGVLPGMVWQDRDVYLQGPIWAKIPHTDGHFHPSPLMGGFGLKHPPPQILIKNTPVPANPSTTFSAAKFASFITQYSTGQVSVEIEWELQKENSKRWNPEIQYTSNYNKSXNVDFTVDTNGVYSEPRPIGTRYLTRNL

SEQ ID NO: 2207 - protein, 621 aa, synthetic construct
TPGFYEIVIKVPSDLDEHLPGISDSFVNWVAEKEWELPPDSDMDLNLIEQAPLTVAEKLQRDFLTEWRRVSKAPEALFFVQFEKGESYFHMHVLVETTGVKSMVLGRFLSQIREKLIQRIYRGIEPTLPNWFAVTKTRNGAGGGNKVVDECYIPNYLLPKTQPELQWAWTNMEQYLSACLNLTERKRLVAQHLTHVSQTQEQNKENQNPNSDAPVIRSKTSARYMELVGWLVDKGITSEKQWIQEDQASYISFNAASNSRSQIKAALDNAGKIMSLTKTAPDYLVGQQPVEDISSNRIYKILELNGYDPQYAASVFLGWATKKFGKRNTIWLFGPATTGKTNIAEAIAHTVPFYGCVNWTNENFPFNDCVDKMVIWWEEGKMTAKVVESAKAILGGSKVRVDQKCKSSAQIDPTPVIVTSNTNMCAVIDGNSTTFEHQQPLQDRMFKFELTRRLDHDFGKVTKQEVKDFFRWAKDHVVEVEHEFYVKKGGAKKRPAPSDADISEPKRVRESVAQPSTSDAEASINYADRYQNKCSRHVGMNLMLFPCRQCERMNQNSNICFTHGQKDCLECFPVSESQPVSVVKKAYQKLCYIHHIMGKVPDACTACDLVNVDLDDCIFEQ

SEQ ID NO: 2208 - protein, 536 aa, synthetic construct
TPGFYEIVIKVPSDLDEHLPGISDSFVNWVAEKEWELPPDSDMDLNLIEQAPLTVAEKLQRDFLTEWRRVSKAPEALFFVQFEKGESYFHMHVLVETTGVKSMVLGRFLSQIREKLIQRIYRGIEPTLPNWFAVTKTRNGAGGGNKVVDECYIPNYLLPKTQPELQWAWTNMEQYLSACLNLTERKRLVAQHLTHVSQTQEQNKENQNPNSDAPVIRSKTSARYMELVGWLVDKGITSEKQWIQEDQASYISFNAASNSRSQIKAALDNAGKIMSLTKTAPDYLVGQQPVEDISSNRIYKILELNGYDPQYAASVFLGWATKKFGKRNTIWLFGPATTGKTNIAEAIAHTVPFYGCVNWTNENFPFNDCVDKMVIWWEEGKMTAKVVESAKAILGGSKVRVDQKCKSSAQIDPTPVIVTSNTNMCAVIDGNSTTFEHQQPLQDRMFKFELTRRLDHDFGKVTKQEVKDFFRWAKDHVVEVEHEFYVKKGGAKKRPAPSDADISEPKRVRESVAQPSTSDAEASINYADRLARGHSL

SEQ ID NO: 2209 - protein, 6 aa, synthetic construct
DVGCEN

What is claimed is:

1. An adeno-associated virus (AAV) vector comprising an AAV capsid polypeptide, wherein said capsid polypeptide comprises the amino acid sequence of any one of SEQ ID NOs:2-1103.

2. The vector of claim 1, wherein said capsid polypeptide comprises the amino acid sequence of SEQ ID NO:1 or SEQ ID NO:2206 except that said amino acid sequence of any one of SEQ ID NOs:2-1103 is located between amino acid positions 587 and 588 of SEQ ID NO:1 or SEQ ID NO:2206.

3. The vector of claim 1, wherein said capsid polypeptide comprises the amino acid sequence of SEQ ID NO:1 or SEQ ID NO:2206 except that the amino acids from position 585 to 590 of SEQ ID NO:1 or SEQ ID NO:2206 are replaced with said amino acid sequence of any one of SEQ ID NOs:2-1103.

4. The vector of any one of claims 1-3, wherein said vector is an AAV2 vector.

5. The vector of any one of claims 1-4, wherein said vector comprises an exogenous nucleic acid encoding an RNA or a polypeptide.

6. The vector of claim 5, wherein said exogenous nucleic acid encodes an RNA.

7. The vector of claim 6, wherein said RNA is an siRNA or microRNA.

8. The vector of claim 5, wherein said exogenous nucleic acid encodes a polypeptide.

9. The vector of claim 8, wherein said polypeptide is an ABCA4 polypeptide, a CRB1 polypeptide, an NPHP5 polypeptide, or an NR2E3 polypeptide.

10. An AAV capsid polypeptide comprising the amino acid sequence of any one of SEQ ID NOs:2-1103.

11. The polypeptide of claim 10, wherein said polypeptide comprises the amino acid sequence of SEQ ID NO:1 or SEQ ID NO:2206 except that said amino acid sequence of any one of SEQ ID NOs:2-1103 is located between amino acid positions 587 and 588 of SEQ ID NO:1 or SEQ ID NO:2206.

12. The polypeptide of claim 10, wherein said polypeptide comprises the amino acid sequence of SEQ ID NO:1 or SEQ ID NO:2206 except that the amino acids from position 585 to 590 of SEQ ID NO:1 or SEQ ID NO:2206 are replaced with said amino acid sequence of any one of SEQ ID NOs:2-1103.

13. A nucleic acid molecule encoding a vector of any one of claims 1-9 or a polypeptide of any one of claim 10-12.

14. The nucleic acid molecule of claim 13, wherein said nucleic acid molecule is DNA.

15. A host cell comprising a nucleic acid molecule of any one of claims 13-14.

16. The host cell of claim 15, wherein said host cell expresses said vector.

17. The host cell of claim 15, wherein said host cell expresses said polypeptide.

18. A host cell comprising a vector of any one of claims 1-9 or a polypeptide of any one of claims 10-12.

19. The host cell of any one of claims 15-18, wherein said host cell is a retinal cell.

20. A composition comprising a vector of any one of claims 1-9, and a pharmaceutically acceptable excipient.

21. The composition of claim 20, wherein said composition comprises from about 1×10⁷ to about 1×10¹⁴ of said vector.

22. The composition of any one of claim 20-21, wherein said pharmaceutically acceptable excipient comprises one or more of phosphate buffered saline, Hank's Balanced Salt Solution, and Pluronic F68.

23. A method for delivering an exogenous nucleic acid sequence to a retinal cell within a mammal, wherein said method comprises contacting said retinal cell with an AAV vector comprising an AAV capsid polypeptide and said exogenous nucleic acid sequence, wherein said capsid polypeptide comprises the amino acid sequence of any one of SEQ ID NOs:2-1103, wherein said AAV vector infects said retinal cell, thereby delivering said exogenous nucleic acid sequence to said retinal cell.

24. The method of claim 23, wherein said capsid polypeptide comprises the amino acid sequence of SEQ ID NO:1 or SEQ ID NO:2206 except that said amino acid sequence of any one of SEQ ID NOs:2-1103 is located between amino acid positions 587 and 588 of SEQ ID NO:1 or SEQ ID NO:2206.

25. The method of 23, wherein said capsid polypeptide comprises the amino acid sequence of SEQ ID NO:1 or SEQ ID NO:2206 except that the amino acids from position 585 to 590 of SEQ ID NO:1 or SEQ ID NO:2206 are replaced with said amino acid sequence of any one of SEQ ID NOs:2-1103.

26. The method of any one of claims 23-25, wherein said mammal is a human.

27. The method of any one of claims 23-26, wherein said vector is an AAV2 vector.

28. The method of any one of claims 23-27, wherein said exogenous nucleic acid sequence encodes an RNA or a polypeptide.

29. The method of claim 28, wherein said exogenous nucleic acid encodes an RNA.

30. The method of claim 29, wherein said RNA is an siRNA or microRNA.

31. The method of claim 28, wherein said exogenous nucleic acid encodes a polypeptide.

32. The method of claim 31, wherein said polypeptide is an ABCA4 polypeptide, a CRB1 polypeptide, an NPHP5 polypeptide, or an NR2E3 polypeptide.

33. The method of any one of claims 23-32, wherein said method comprises intravitreally administering a composition comprising said vector to said mammal, thereby contacting said retinal cell with said vector.

34. The method of claim 33, wherein said composition comprises from about 1×10⁷ to about 1×10¹⁴ of said vector.

35. A method for treating a retinal condition in a mammal in need thereof, wherein said method comprises contacting retinal cells of a mammal having said retinal condition with AAV vectors comprising an AAV capsid polypeptide and an exogenous nucleic acid sequence, wherein said capsid polypeptide comprises the amino acid sequence of any one of SEQ ID NOs:2-1103, wherein said AAV vectors infect said retinal cells and drive expression of said exogenous nucleic acid sequence within said retinal cells, thereby treating said retinal condition.

36. The method of claim 35, wherein said mammal is a human.

37. The method of any one of claims 35-36, wherein said retinal condition is selected from the group consisting of cone dystrophy, cone/rod dystrophy, retinitis pigmentosa, macular degeneration, achromatopsia, blue cone monochromcy, and color blindness.

38. The method of any one of claims 35-37, wherein said capsid polypeptide comprises the amino acid sequence of SEQ ID NO:1 or SEQ ID NO:2206 except that said amino acid sequence of any one of SEQ ID NOs:2-1103 is located between amino acid positions 587 and 588 of SEQ ID NO:1 or SEQ ID NO:2206.

39. The method of any one of claims 35-37, wherein said capsid polypeptide comprises the amino acid sequence of SEQ ID NO:1 or SEQ ID NO:2206 except that the amino acids from position 585 to 590 of SEQ ID NO:1 are replaced with said amino acid sequence of any one of SEQ ID NOs:2-1103 or SEQ ID NO:2206.

40. The method of any one of claims 35-39, wherein said vectors are AAV2 vectors.

41. The method of any one of claims 35-40, wherein said exogenous nucleic acid sequence encodes an RNA.

42. The method of claim 41, wherein said RNA is an siRNA or a microRNA.

43. The method of any one of claims 35-40, wherein said exogenous nucleic acid encodes a polypeptide.

44. The method of claim 43, wherein said polypeptide is an ABCA4 polypeptide, a CRB1 polypeptide, an NPHP5 polypeptide, and an NR2E3 polypeptide.

45. The method of any one of claims 35-44, wherein said method comprises intravitreally administering a composition comprising said vectors to said mammal, thereby contacting said retinal cells with said vectors.

46. The method of claim 45, wherein said composition comprises from about 1×10⁷ to about 1×10¹⁴ of said vectors.

47. A non-naturally occurring AAV capsid polypeptide, wherein said capsid polypeptide comprises the amino acid sequence of SEQ ID NO:1 or SEQ ID NO:2206 comprising an amino acid sequence insert of Formula A located between amino acid positions 587 and 588 of SEQ ID NO:1 or SEQ ID NO:2206, wherein said Formula A is:
-L1-INSERT-L2-,
wherein said L1 and said L2 are each independently optional amino acid linkers having one, two, or three amino acids, and wherein INSERT represents the amino acid sequence of any of the sequence identifiers of Tables 1A-1L without the starting “LA” and the ending “A.”

48. The capsid polypeptide of claim 47, wherein said L1 is one amino acid X1.

49. The capsid polypeptide of claim 48, wherein said X1 is selected from the group of amino acid residues consisting of A, V, I, and L.

50. The capsid polypeptide of claim 48, wherein said X1 is A.

51. The capsid polypeptide of claim 47, wherein said L1 is two amino acids X2-X1.

52. The capsid polypeptide of claim 51, wherein said X1 is selected from the group of amino acid residues consisting of A, V, I, and L.

53. The capsid polypeptide of claim 51, wherein said X1 is A.

54. The capsid polypeptide of any one of claims 51-53, wherein said X2 is selected from the group of amino acid residues consisting of A, V, I, and L.

55. The capsid polypeptide of claim 54, wherein said X2 is L.

56. The capsid polypeptide of claim 51, wherein said X2-X1 is LA.

57. The capsid polypeptide of claim 47, wherein said L1 is three amino acids X3-X2-X1.

58. The capsid polypeptide of claim 57, wherein said X1 is selected from the group of amino acid residues consisting of A, V, I, and L.

59. The capsid polypeptide of claim 58, wherein said X1 is A.

60. The capsid polypeptide of any one of claims 57-59-111, wherein said X2 is selected from the group of amino acid residues consisting of A, V, I, and L.

61. The capsid polypeptide of claim 60, wherein said X2 is L.

62. The capsid polypeptide of claim 57, wherein said X2-X1 is LA.

63. The capsid polypeptide of any one of claims 57-62, wherein said X3 is selected from the group of amino acid residues consisting of A, V, I, and L.

64. The capsid polypeptide of claim 47, wherein said L1 is absent.

65. The capsid polypeptide of any one of claims 47-64, wherein said L2 is one amino acid Z1.

66. The capsid polypeptide of claim 65, wherein said Z1 is selected from the group of amino acid residues consisting of A, V, I, and L.

67. The capsid polypeptide of claim 66, wherein said Z1 is A.

68. The capsid polypeptide of any one of claims 47-64, wherein said L2 is two amino acids Z1-Z2.

69. The capsid polypeptide of claim 68, wherein said Z1 is selected from the group of amino acid residues consisting of A, V, I, and L.

70. The capsid polypeptide of claim 69, wherein said Z1 is A.

71. The capsid polypeptide of any one of claims 68-70, wherein said Z2 is selected from the group of amino acid residues consisting of A, V, I, and L.

72. The capsid polypeptide of claim 71, wherein said Z2 is L.

73. The capsid polypeptide of claim 68, wherein said Z1-Z2 is AL.

74. The capsid polypeptide of any one of claims 47-64, wherein said L2 is three amino acids Z1-Z2-Z3.

75. The capsid polypeptide of claim 74, wherein said Z1 is selected from the group of amino acid residues consisting of A, V, I, and L.

76. The capsid polypeptide of claim 75, wherein said Z1 is A.

77. The capsid polypeptide of any one of claims 74-76, wherein said Z2 is selected from the group of amino acid residues consisting of A, V, I, and L.

78. The capsid polypeptide of claim 77, wherein said Z2 is L.

79. The capsid polypeptide of claim 74, wherein said Z1-Z2 is AL.

80. The capsid polypeptide of any one of claims 74-79, wherein said Z3 is selected from the group of amino acid residues consisting of A, V, I, and L.

81. The capsid polypeptide of any one of claims 47-64, wherein said L2 is absent.

82. The capsid polypeptide of claim 47, wherein said amino acid sequence insert comprises any one of the amino acid sequences of a sequence identifier of Tables 1A-1L that starts with “LA” and ends with “A.”

83. A non-naturally occurring adeno-associated virus (AAV) vector comprising an AAV capsid polypeptide according to any one of claims 47-82.

84. A viral particle comprising a capsid polypeptide of any one of claims 47-82.

85. A method for administering an exogenous nucleic acid sequence to a mammal in need thereof, wherein said method comprises administering an effective amount of a vector of claim 83 to said mammal, wherein said vector comprising said exogenous nucleic acid sequence.

86. The method of claim 85, wherein said mammal is a human.

87. The method of any one of claims 85-86, wherein said administering comprises administering said effective amount to an eye of said mammal.

88. The method of any one of claims 85-87, wherein said administering is sufficient to allow for expression of said exogenous nucleic acid sequence in a cell of said mammal.

89. The method of any one of claims 85-88, wherein said exogenous nucleic acid sequence encodes a therapeutic polypeptide.

90. A method of treating a retinal disorder in a patient in need thereof, comprising administering to the patient's eye an effective amount of an AAV vector, wherein the AAV vector comprises an AAV capsid polypeptide and an exogenous nucleic acid sequence, wherein the AAV capsid polypeptide is represented by Formula A.
